(19) United States
(12) Patent Application Publication
(10) Pub. No.: US 2022/0372483 A1
(43) Pub. Date: Nov. 24, 2022

(54) Modified Guide RNAs for Gene Editing

(71) Applicant: Intellia Therapeutics, Inc., Cambridge, MA (US)

(72) Inventors: Seth C. Alexander, Medford, MA (US); Sabin Mulepati, Somerville, MA (US); Matthew Roy, Arlington, MA (US)

(73) Assignee: Intellia Therapeutics, Inc., Cambridge, MA (US)

(21) Appl. No.: 17/836,265

(22) Filed: Jun. 9, 2022

Related U.S. Application Data
(63) Continuation of application No. PCT/US2020/064250, filed on Dec. 10, 2020.
(60) Provisional application No. 62/946,905, filed on Dec. 11, 2019.

(51) Int. Cl. C12N 15/113; C12N 9/22

(52) U.S. Cl. CPC C12N 15/113; C12N 9/22; C12N 2310/20; C12N 2310/315

(57) ABSTRACT

This disclosure relates to modified guide RNAs having improved in vitro and in vivo activity in gene editing methods.

[0001] This patent application is a Continuation application of International Application No. PCT/US2020/064250, filed on Dec. 10, 2020, which claims the benefit of priority to U.S. Provisional Application No. 62/946,905, filed Dec. 11, 2019, the contents of each of which are incorporated herein by reference in its entirety for all purposes.

[0002] The instant application contains a Sequence Listing which has been submitted electronically in ASCII format and is hereby incorporated by reference in its entirety. Said ASCII copy, created on Jun. 9, 2022, is named 01155-0032-00US_ST25.txt and is 614,545 bytes in size.

[0003] This disclosure relates to the field of gene editing using CRISPR/Cas systems, a part of the prokaryotic immune system that recognizes and cuts exogenous genetic elements. The CRISPR/Cas system relies on a single nuclease, termed CRISPR-associated protein 9 (Cas9), which induces site-specific breaks in DNA. Cas9 is guided to specific DNA sequences by small RNA molecules termed guide RNA (gRNA). A complete guide RNA comprises tracrRNA (trRNA) and crisprRNA (crRNA). A crRNA comprising a guide region may also be referred to as a gRNA, with the understanding that to form a complete gRNA it should be or become associated covalently or noncovalently with a trRNA. The trRNA and crRNA may be contained within a single guide RNA (sgRNA) or in two separate RNA molecules of a dual guide RNA (dgRNA). Cas9 in combination with trRNA and crRNA or an sgRNA is termed the Cas9 ribonucleoprotein complex (RNP).

[0004] Oligonucleotides, and in particular RNA, are sometimes degraded in cells and in serum by non-enzymatic, endonuclease or exonuclease cleavage. Oligonucleotides can be synthesized with modifications at various positions to reduce or prevent such degradation. Given the cyclic nature and imperfect yield of oligonucleotide synthesis, shortening the gRNA while retaining or even improving its activity would be desirable, e.g., so that the gRNA can be obtained in greater yield, and/or compositions comprising the gRNA have greater homogeneity and/or fewer incomplete or erroneous products. Additionally, improved methods and compositions for preventing such degradation, improving stability of gRNAs and enhancing gene editing efficiency is desired, especially for therapeutic applications.

### SUMMARY

[0005] In some embodiments, genome editing tools are provided comprising guide RNA (gRNA) with one or more shortened regions and/or substitutions as described herein. The shortened regions or substitutions described herein may facilitate synthesis of the gRNA with greater yield and/or homogeneity, and/or may improve the stability of the gRNA and the gRNA/Cas9 complex and improve the activity of Cas9 (e.g., SaCas9, SpyCas9, and equivalents) to cleave target DNA.

[0006] In some embodiments, crisprRNA (crRNA) and/or tracrRNA (trRNA) with one or more shortened regions and/or substitutions as described herein are provided. In some embodiments, the modified crRNA and/or modified trRNA comprise a dual guide RNA (dgRNA). In some embodiments, the modified crRNA and/or modified trRNA comprise a single guide RNA (sgRNA). The shortened regions and/or substitutions described herein may facilitate synthesis of the gRNA with greater yield and/or homogeneity and/or may improve the stability of the gRNA and the gRNA/Cas9 complex and improve the activity of Cas9 (e.g., SauCas9, SpyCas9, and equivalents) to cleave target DNA. Compared to 100mer sgRNAs or other short guide RNAs, synthesis of the presently disclosed guide RNAs may increase crude yield of a guide RNA. Similarly, gRNA sample purity as measured by the proportion of full length product, e.g. crude purity, can be increased. gRNA can be obtained in greater yield, and/or compositions comprising the gRNA can have greater homogeneity and/or fewer incomplete or erroneous products. Guide RNA purity may be assessed using ion-pair reversed-phase high performance liquid chromatography (IP-RP-HPLC) and ion exchange HPLC methods, e.g. as in Kanavarioti et al, Sci Rep 9, 1019 (2019) (doi:10.1038/s41598-018-37642-z). Using UV spectroscopy at a wavelength of 260 nm, crude purity and final purity can be determined by the ratio of absorbance of the main peak to the cumulative absorbance of all peaks in the chromatogram. Synthetic yield is determined as the ratio of the absorbance at 260 nm of the final sample compared to the theoretical absorbance of input materials.

[0007] The following embodiments are encompassed.

[0008] Embodiment 1 is a guide RNA (gRNA) comprising a 5′ end modification or a 3′ end modification and a conserved portion of an gRNA comprising one or more of:

[0009] (a) a shortened hairpin 1 region or a substituted and optionally shortened hairpin 1 region, wherein (i) the shortened hairpin 1 region lacks 6-8 nucleotides; and (A) one or more of positions H1-1, H1-2, or H1-3 is deleted or substituted relative to SEQ ID NO: 400 and/or (B) one or more of positions H1-6 through H1-10 is substituted relative to SEQ ID NO: 400; or (ii) the shortened hairpin 1 region lacks 9-10 nucleotides including H1-1 and/or H1-12; or (iii) the shortened hairpin 1 region lacks 5-10 nucleotides and one or more of positions N18, H1-12, or N is substituted relative to SEQ ID NO: 400; or (iv) at least one of the following pairs of nucleotides are substituted in the substituted and optionally shortened hairpin 1 with Watson-Crick pairing nucleotides: H1-1 and H1-12, H1-2 and H1-11, H1-3 and H1-10, and/or H1-4 and H1-9, and the hairpin 1 region optionally lacks (aa) any one or two of H1-5 through H1-8, (bb) one, two, or three of the following pairs of nucleotides: H1-1 and H1-12, H1-2 and H1-11, H1-3 and H1-10 and/or H1-4 and H1-9, and/or (cc) 1-8 nucleotides of the hairpin 1 region; and/or

[0010] (b) a shortened upper stem region, wherein the shortened upper stem region lacks 1-6 nucleotides; and/or

[0011] (c) a substitution relative to SEQ ID NO: 400 at any one or more of LS6, LS7, US3, US10, B3, N7, N15, N17, H2-2 and H2-14, wherein the substituent nucleotide is neither a pyrimidine that is followed by an adenine, nor an adenine that is preceded by a pyrimidine.

[0012] Embodiment 1.01 is the gRNA of embodiment 1, wherein the hairpin 1 region is a substituted harpin 1 region and lacks 1 nucleotide.

[0013] Embodiment 1.02 is the gRNA of embodiment 1, wherein the hairpin 1 region is a substituted harpin 1 region and lacks 2 nucleotides.

[0014] Embodiment 1.03 is the gRNA of embodiment 1, wherein the hairpin 1 region is a substituted harpin 1 region and lacks 3 nucleotides.

[0015] Embodiment 1.04 is the gRNA of embodiment 1, wherein the hairpin 1 region is a substituted harpin 1 region and lacks 4 nucleotides.

[0016] Embodiment 1.05 is the gRNA of embodiment 1, wherein the hairpin 1 region is a substituted harpin 1 region and lacks 5 nucleotides.

[0017] Embodiment 1.06 is the gRNA of embodiment 1, wherein the hairpin 1 region is a substituted harpin 1 region and lacks 6 nucleotides.

[0018] Embodiment 1.07 is the gRNA of embodiment 1, wherein the hairpin 1 region is a substituted harpin 1 region and lacks 7 nucleotides.

[0019] Embodiment 1.08 is the gRNA of embodiment 1, wherein the hairpin 1 region is a substituted harpin 1 region and lacks 8 nucleotides.

[0020] Embodiment 1.09 is the gRNA of embodiment 1, wherein the gRNA comprises a substituted and optionally shortened hairpin 1 in which H1-1 and H1-12 are substituted with Watson-Crick pairing nucleotides.

[0021] Embodiment 1.10 is the gRNA of any one of the preceding embodiments, wherein the gRNA comprises a substituted and optionally shortened hairpin 1 in which H1-2 and H1-11 are substituted with Watson-Crick pairing nucleotides.

[0022] Embodiment 1.11 is the gRNA of any one of the preceding embodiments, wherein the gRNA comprises a substituted and optionally shortened hairpin 1 in which H1-3 and H1-10 are substituted with Watson-Crick pairing nucleotides.

[0023] Embodiment 1.12 is the gRNA of any one of the preceding embodiments, wherein the gRNA comprises a substituted and optionally shortened hairpin 1 in which H1-4 and H1-9 are substituted with Watson-Crick pairing nucleotides.

[0024] Embodiment 1.13 is the gRNA of any one of the preceding embodiments, wherein position H1-5 is deleted.

[0025] Embodiment 1.14 is the gRNA of any one of the preceding embodiments, wherein position H1-6 is deleted.

[0026] Embodiment 1.15 is the gRNA of any one of the preceding embodiments, wherein position H1-7 is deleted.

[0027] Embodiment 1.16 is the gRNA of any one of the preceding embodiments, wherein position H1-8 is deleted.

[0028] Embodiment 1.17 is the gRNA of any one of the preceding embodiments, wherein two of H1-5, H1-6, H1-7, and H1-8 are deleted.

[0029] Embodiment 1.18 is the gRNA of any one of the preceding embodiments, wherein positions H1-1 and H1-12 are deleted.

[0030] Embodiment 1.19 is the gRNA of any one of the preceding embodiments, wherein positions H1-2 and H1-11 are deleted.

[0031] Embodiment 1.20 is the gRNA of any one of the preceding embodiments, wherein positions H1-3 and H1-10 are deleted.

[0032] Embodiment 1.21 is the gRNA of any one of the preceding embodiments, wherein positions H1-4 and H1-9 are deleted.

[0033] Embodiment 1.22 is the gRNA of any one of the preceding embodiments, wherein two pairs of positions H1-1 and H1-12, positions H1-2 and H1-11, positions H1-3 and H1-10 and positions H1-4 and H1-9 are deleted.

[0034] Embodiment 1.23 is the gRNA of any one of the preceding embodiments, wherein three pairs of positions H1-1 and H1-12, positions H1-2 and H1-11, positions H1-3 and H1-10 and positions H1-4 and H1-9 are deleted.

[0035] Embodiment 2 is the gRNA of any one of the preceding embodiments, wherein position H1-1 is deleted.

[0036] Embodiment 3 is the gRNA of any one of embodiments 1-1.23, wherein position H1-1 is substituted.

[0037] Embodiment 4 is the gRNA of any one of the preceding embodiments, wherein position H1-2 is deleted.

[0038] Embodiment 5 is the gRNA of any one of embodiments 1-3, wherein position H1-2 is substituted.

[0039] Embodiment 6 is the gRNA of any one of the preceding embodiments, wherein position H1-3 is deleted.

[0040] Embodiment 7 is the gRNA of any one of embodiments 1-5, wherein position H1-3 is substituted.

[0041] Embodiment 8 is the gRNA of any one of the preceding embodiments, wherein position H1-4 is deleted.

[0042] Embodiment 9 is the gRNA of any one of embodiments 1-7, wherein position H1-5 is deleted.

[0043] Embodiment 10 is the gRNA of any one of the preceding embodiments, wherein position H1-6 is deleted.

[0044] Embodiment 11 is the gRNA of any one of embodiments 1-9, wherein position H1-6 is substituted.

[0045] Embodiment 12 is the gRNA of any one of the preceding embodiments, wherein position H1-7 is deleted.

[0046] Embodiment 13 is the gRNA of any one of embodiments 1-11, wherein position H1-7 is substituted.

[0047] Embodiment 14 is the gRNA of any one of the preceding embodiments, wherein position H1-8 is deleted.

[0048] Embodiment 15 is the gRNA of any one of embodiments 1-13, wherein position H1-8 is substituted.

[0049] Embodiment 16 is the gRNA of any one of the preceding embodiments, wherein position H1-9 is deleted.

[0050] Embodiment 17 is the gRNA of any one of embodiments 1-15, wherein position H1-9 is substituted.

[0051] Embodiment 18 is the gRNA of any one of the preceding embodiments, wherein position H1-10 is deleted.

[0052] Embodiment 19 is the gRNA of any one of embodiments 1-17, wherein position H1-10 is substituted.

[0053] Embodiment 20 is the gRNA of any one of the preceding embodiments, wherein position H1-11 is deleted.

[0054] Embodiment 21 is the gRNA of any one of the preceding embodiments, wherein position H1-12 is deleted.

[0055] Embodiment 22 is the gRNA of any one of embodiments 1-7, comprising a shortened hairpin 1 region that lacks 6-8 nucleotides.

[0056] Embodiment 23 is the gRNA of any one of the preceding embodiments, wherein the shortened hairpin 1 region has a length of 4 nucleotides.

[0057] Embodiment 24 is the gRNA of any one of embodiments 1-22, wherein the shortened hairpin 1 region has a length of 5 nucleotides.

[0058] Embodiment 25 is the gRNA of any one of embodiments 1-22, wherein the shortened hairpin 1 region has a length of 6 nucleotides.

[0059] Embodiment 26 is the gRNA of any one of embodiments 23-25, wherein the 4, 5, or 6 nucleotides of the shortened hairpin 1 region include less than or equal to 2 substitutions.

[0060] Embodiment 27 is the gRNA of embodiment 26, wherein the 4, 5, or 6 nucleotides of the shortened hairpin 1 region include one substitution.

[0061] Embodiment 28 is the gRNA of embodiment 26, wherein the 4, 5, or 6 nucleotides of the shortened hairpin 1 region are unsubstituted.

[0062] Embodiment 29 is the gRNA of any one of the preceding embodiments, wherein positions H1-2 through H1-4 are deleted.

[0063] Embodiment 30 is the gRNA of any one of the preceding embodiments, wherein positions H1-2 through H1-5 are deleted.

[0064] Embodiment 31 is the gRNA of any one of the preceding embodiments, wherein positions H1-9 through H1-11 are deleted.

[0065] Embodiment 32 is the gRNA of any one of the preceding embodiments, wherein positions H1-8 through H1-11 are deleted.

[0066] Embodiment 33 is the gRNA of any one of the preceding embodiments, wherein positions H1-2 through H1-4 and H1-9 through H1-11 are deleted.

[0067] Embodiment 34 is the gRNA of embodiment 33, wherein the shortened hairpin 1 region comprises:

(a) the sequence AGAAAU;
(b) a sequence having less than or equal to 2 mismatches to the sequence of (a); or
(c) a sequence having less than or equal to 1 mismatch to the sequence of (a).

[0068] Embodiment 35 is the gRNA of any one of embodiments 1-32, wherein positions H1-2 through H1-5 and H1-9 through H1-11 are deleted.

[0069] Embodiment 36 is the gRNA of embodiment 35, wherein each position of the upper stem region is modified, optionally wherein each position of the upper stem region is modified by 2′-O-methylation.

[0070] Embodiment 37 is the gRNA of any one of embodiments 35 or 36, wherein the shortened hairpin 1 region comprises:

(a) the sequence AAAAU;
(b) a sequence having less than or equal to 2 mismatches to the sequence of (a); or
(c) a sequence having less than or equal to 1 mismatch to the sequence of (a).

[0071] Embodiment 38 is the gRNA of any one of embodiments 1-32, wherein positions H1-2 through H1-5 and H1-8 through H1-11 are deleted.

[0072] Embodiment 39 is the gRNA of embodiment 38, wherein each position of the upper stem region is modified, optionally wherein each position of the upper stem region is modified by 2′-O-methylation.

[0073] Embodiment 40 is the gRNA of any one of embodiments 38 or 39, wherein the shortened hairpin 1 region comprises:

(a) the sequence AAAU;
(b) a sequence having less than or equal to 2 mismatches to the sequence of (a); or
(c) a sequence having less than or equal to 1 mismatch to the sequence of (a).

[0074] Embodiment 41 is the gRNA of any one of embodiments 1-32, wherein positions H1-1, H1-3 through H1-8, and H1-12 are deleted.

[0075] Embodiment 42 is the gRNA of embodiment 41, wherein each position of the upper stem region is modified, optionally wherein each position of the upper stem region is modified by 2′-O-methylation.

[0076] Embodiment 43 is the gRNA of any one of embodiments 41 or 42, wherein the shortened hairpin 1 region comprises:

(a) the sequence CAAG;
(b) a sequence having less than or equal to 2 mismatches to the sequence of (a); or
(c) a sequence having less than or equal to 1 mismatch to the sequence of (a).

[0077] Embodiment 44 is the gRNA of any one of the preceding embodiments, wherein positions H1-1 through H1-8 are deleted.

[0078] Embodiment 45 is the gRNA of any one of the preceding embodiments, wherein positions H1-11 through H1-12 are deleted.

[0079] Embodiment 46 is the gRNA of any one of embodiments 1-32, wherein positions H1-2 through H1-8 are deleted.

[0080] Embodiment 47 is the gRNA of embodiment 46, wherein the shortened hairpin 1 region comprises:

(a) the sequence AAAGU;
(b) a sequence having less than or equal to 2 mismatches to the sequence of (a); or
(c) a sequence having less than or equal to 1 mismatch to the sequence of (a).

[0081] Embodiment 48 is the gRNA of any one of embodiments 1-32, wherein positions H1-3 through H1-9 are deleted.

[0082] Embodiment 49 is the gRNA of embodiment 48, wherein the shortened hairpin 1 region comprises:

(a) the sequence ACAGU;
(b) a sequence having less than or equal to 2 mismatches to the sequence of (a); or
(c) a sequence having less than or equal to 1 mismatch to the sequence of (a).

[0083] Embodiment 50 is the gRNA of any one of the preceding embodiments, wherein position H1-7 is substituted with a G.

[0084] Embodiment 51 is the gRNA of any one of the preceding embodiments, wherein position H1-8 is substituted with a C.

[0085] Embodiment 52 is the gRNA of any one of the preceding embodiments, wherein positions H1-7 and H1-8 are substituted.

[0086] Embodiment 53 is the gRNA of any one of the preceding embodiments, wherein positions H1-7 and H1-8 are substituted with a G and a C, respectively.

[0087] Embodiment 54 is the gRNA of any one of the preceding embodiments, wherein positions H1-7 and H1-8 are substituted with a G and a C, respectively, and positions H1-2 through H1-4 and H1-9 through H1-11 are deleted.

[0088] Embodiment 55 is the gRNA of embodiment 54, wherein the shortened hairpin 1 region comprises:

(a) the sequence AGAGCU;
(b) a sequence having less than or equal to 2 mismatches to the sequence of (a); or
(c) a sequence having less than or equal to 1 mismatch to the sequence of (a).

[0089] Embodiment 56 is the gRNA of any one of the preceding embodiments, wherein position H1-6 is substituted with a C.

[0090] Embodiment 57 is the gRNA of any one of the preceding embodiments, wherein position H1-7 is substituted with a U.

[0091] Embodiment 58 is the gRNA of any one of the preceding embodiments, wherein positions H1-6 and H1-7 are substituted.

[0092] Embodiment 59 is the gRNA of any one of the preceding embodiments, wherein positions H1-6 and H1-7 are substituted with a C and a U, respectively.

[0093] Embodiment 60 is the gRNA of any one of the preceding embodiments, wherein positions H1-6 and H1-7 are substituted with a C and a U, respectively, and positions H1-2 through H1-4 and H1-9 through H1-11 are deleted.

[0094] Embodiment 61 is the gRNA of embodiment 60, wherein the shortened hairpin 1 region comprises:

(a) the sequence AGCUAU;
(b) a sequence having less than or equal to 2 mismatches to the sequence of (a); or
(c) a sequence having less than or equal to 1 mismatch to the sequence of (a).

[0095] Embodiment 62 is the gRNA of any one of the preceding embodiments, wherein position H1-1 is substituted with a C.

[0096] Embodiment 63 is the gRNA of any one of the preceding embodiments, wherein position H1-12 is substituted with a G.

[0097] Embodiment 64 is the gRNA of any one of the preceding embodiments, wherein positions H1-1 and H1-12 are substituted.

[0098] Embodiment 65 is the gRNA of any one of the preceding embodiments, wherein positions H1-1 and H1-12 are substituted with a C and a G, respectively.

[0099] Embodiment 66 is the gRNA of any one of the preceding embodiments, wherein positions H1-1 and H1-12 are substituted with a C and a G, respectively, and positions H1-2 through H1-4 and H1-9 through H1-11 are deleted.

[0100] Embodiment 67 is the gRNA of embodiment 66, wherein each position of the upper stem region is modified, optionally wherein each position of the upper stem region is modified by 2′-O-methylation.

[0101] Embodiment 68 is the gRNA of any one of embodiments 66 or 67, wherein the shortened hairpin 1 region comprises:

(a) the sequence CGAAAG;
(b) a sequence having less than or equal to 2 mismatches to the sequence of (a); or
(c) a sequence having less than or equal to 1 mismatch to the sequence of (a).

[0102] Embodiment 69 is the gRNA of any one of embodiments 1-22, comprising a shortened hairpin 1 region that lacks 9-10 nucleotides.

[0103] Embodiment 70 is the gRNA of embodiment 69, wherein the shortened hairpin 1 region has a length of 2 nucleotides.

[0104] Embodiment 71 is the gRNA of embodiment 69, wherein the shortened hairpin 1 region has a length of 3 nucleotides.

[0105] Embodiment 72 is the gRNA of embodiment 70 or 71, wherein the 2 or 3 nucleotides of the shortened hairpin 1 region are unsubstituted.

[0106] Embodiment 73 is the gRNA of any one of the preceding embodiments, wherein positions H1-11 through H1-12 are deleted.

[0107] Embodiment 74 is the gRNA of embodiment 73, wherein positions H1-1 through H1-8 and H1-11 through H1-12 are deleted.

[0108] Embodiment 75 is the gRNA of embodiment 74, wherein the shortened hairpin 1 region comprises:

(a) the sequence AA; or
(b) a sequence having less than or equal to 1 mismatch to the sequence of (a).

[0109] Embodiment 76 is the gRNA of any one of embodiments 1-21 or 69-72, wherein positions H1-1 through H1-9 and H1-12 are deleted.

[0110] Embodiment 77 is the gRNA of embodiment 76, wherein the shortened hairpin 1 region comprises:

(a) the sequence AG;
(b) a sequence having less than or equal to 1 mismatch to the sequence of (a).

[0111] Embodiment 78 is the gRNA of any one of embodiments 1-21, comprising a shortened hairpin 1 region that lacks 5-10 nucleotides.

[0112] Embodiment 79 is the gRNA of embodiment 78, wherein the shortened hairpin 1 region has a length of 7 nucleotides.

[0113] Embodiment 80 is the gRNA of any one of embodiments 78 or 79, wherein positions H1-4 through H1-11 are deleted.

[0114] Embodiment 81 is the gRNA of any one of the preceding embodiments, wherein position N18 is substituted.

[0115] Embodiment 82 is the gRNA of embodiment 81, wherein position N18 is substituted with a C.

[0116] Embodiment 83 is the gRNA of embodiment 82, wherein position N18 is substituted with a C and positions H1-4 through H1-11 are deleted.

[0117] Embodiment 84 is the gRNA of embodiment 83, wherein the gRNA comprises a segment containing position N18, the shortened hairpin 1 region, and position N, and the segment comprises:

(a) the sequence CACUUG;
(b) a sequence having less than or equal to 2 mismatches to the sequence of (a); or
(c) a sequence having less than or equal to 1 mismatch to the sequence of (a).

[0118] Embodiment 85 is the gRNA of any one of the preceding embodiments, wherein position H1-12 is substituted.

[0119] Embodiment 86 is the gRNA of embodiment 85, wherein position H1-12 is substituted with a C.

[0120] Embodiment 87 is the gRNA of embodiment 86, wherein position H1-12 is substituted with an A.

[0121] Embodiment 88 is the gRNA of any one of the preceding embodiments, wherein position N is substituted.

[0122] Embodiment 89 is the gRNA of embodiment 88, wherein position N is substituted with an A.

[0123] Embodiment 90 is the gRNA of embodiment 89, wherein position H1-12 is substituted with a C and position N is substituted with an A.

[0124] Embodiment 91 is the gRNA of embodiment 90, wherein position H1-12 is substituted with a C, position N is substituted with an A, and positions H1-4 through H1-11 are deleted.

[0125] Embodiment 92 is the gRNA of embodiment 91, wherein the gRNA comprises a segment containing position N18, the shortened hairpin 1 region, and position N, and the segment comprises:

(a) the sequence AACUCA;
(b) a sequence having less than or equal to 2 mismatches to the sequence of (a); or
(c) a sequence having less than or equal to 1 mismatch to the sequence of (a).

[0126] Embodiment 93 is the gRNA of embodiment 85, wherein position H1-12 is substituted with an A and position N is substituted with an A.

[0127] Embodiment 94 is the gRNA of embodiment 93, wherein position H1-12 is substituted with an A, position N is substituted with an A, and positions H1-4 through H1-11 are deleted.

[0128] Embodiment 95 is the gRNA of embodiment 94, wherein the gRNA comprises a segment containing position N18, the shortened hairpin 1 region, and position N, and the segment comprises:

(a) the sequence AACUAA;
(b) a sequence having less than or equal to 2 mismatches to the sequence of (a); or
(c) a sequence having less than or equal to 1 mismatch to the sequence of (a).

[0129] Embodiment 96 is the gRNA of any one of the preceding embodiments, comprising a shortened upper stem region.

[0130] Embodiment 97 is the gRNA of embodiment 96, wherein the shortened upper stem region lacks 1-6 nucleotides.

[0131] Embodiment 98 is the gRNA of embodiment 97, wherein the shortened upper stem region has a length of 6 nucleotides.

[0132] Embodiment 99 is the gRNA of embodiment 97, wherein the shortened upper stem region has a length of 7 nucleotides.

[0133] Embodiment 100 is the gRNA of embodiment 97, wherein the shortened upper stem region has a length of 8 nucleotides.

[0134] Embodiment 101 is the gRNA of embodiment 97, wherein the shortened upper stem region has a length of 9 nucleotides.

[0135] Embodiment 102 is the gRNA of embodiment 97, wherein the shortened upper stem region has a length of 10 nucleotides.

[0136] Embodiment 103 is the gRNA of embodiment 97, wherein the shortened upper stem region has a length of 11 nucleotides.

[0137] Embodiment 104 is the gRNA of any one of embodiments 98-103, wherein the 6, 7, 8, 9, 10, or 11 nucleotides of the shortened upper stem region include less than or equal to 4 substitutions.

[0138] Embodiment 105 is the gRNA of any one of embodiments 98-103, wherein the 6, 7, 8, 9, 10, or 11 nucleotides of the shortened upper stem region include less than or equal to 2 substitutions.

[0139] Embodiment 106 is the gRNA of any one of embodiments 98-103, wherein the 6, 7, 8, 9, 10, or 11 nucleotides of the shortened upper stem region include one substitution.

[0140] Embodiment 107 is the gRNA of any one of embodiments 98-103, wherein the 6, 7, 8, 9, 10, or 11 nucleotides of the shortened upper stem region are unsubstituted.

[0141] Embodiment 108 is the gRNA of any one of the preceding embodiments, wherein position US3 is deleted.

[0142] Embodiment 109 is the gRNA of any one of the preceding embodiments, wherein position US4 is deleted.

[0143] Embodiment 110 is the gRNA of any one of the preceding embodiments, wherein position US5 is deleted.

[0144] Embodiment 111 is the gRNA of any one of the preceding embodiments, wherein position US8 is deleted.

[0145] Embodiment 112 is the gRNA of any one of the preceding embodiments, wherein position US9 is deleted.

[0146] Embodiment 113 is the gRNA of any one of the preceding embodiments, wherein position US10 is deleted.

[0147] Embodiment 114 is the gRNA of any one of the preceding embodiments, wherein positions US4 and US9 are deleted.

[0148] Embodiment 115 is the gRNA of embodiment 114, wherein positions H1-2 through H1-5 and H1-8 through H1-11 are deleted.

[0149] Embodiment 116 is the gRNA of any one of embodiments 114 or 115, wherein the shortened upper stem region comprises:

(a) the sequence GCUGAAAGGC (SEQ ID NO: 1004);
(b) a sequence having less than or equal to 2 mismatches to the sequence of (a); or
(c) a sequence having less than or equal to 1 mismatch to the sequence of (a).

[0150] Embodiment 117 is the gRNA of any one of the preceding embodiments, wherein positions US3 and US4 are deleted.

[0151] Embodiment 118 is the gRNA of any one of the preceding embodiments, wherein positions US9 and US10 are deleted.

[0152] Embodiment 119 is the gRNA of embodiment 118, wherein positions US3, US4, US9, and US10 are deleted.

[0153] Embodiment 120 is the gRNA of embodiment 119, wherein positions H1-2 through H1-5 and H1-8 through H1-11 are deleted.

[0154] Embodiment 121 is the gRNA of any one of embodiments 119 or 120, wherein the shortened upper stem region comprises:

(a) the sequence GCGAAAGC;
(b) a sequence having less than or equal to 2 mismatches to the sequence of (a); or
(c) a sequence having less than or equal to 1 mismatch to the sequence of (a).

[0155] Embodiment 122 is the gRNA of embodiment 119 or 121, wherein positions H1-1 and H1-4 through H1-12 are deleted.

[0156] Embodiment 123 is the gRNA of embodiment 119, wherein positions US3, US4, US8, US9, and US10 are deleted.

[0157] Embodiment 124 is the gRNA of embodiment 123, wherein the shortened upper stem region comprises:

(a) the sequence GCGAAGC;
(b) a sequence having less than or equal to 2 mismatches to the sequence of (a); or
(c) a sequence having less than or equal to 1 mismatch to the sequence of (a).

[0158] Embodiment 125 is the gRNA of embodiment 119, wherein positions US3, US4, US5, US9, and US10 are deleted.

[0159] Embodiment 126 is the gRNA of embodiment 125, wherein the shortened upper stem region comprises:

(a) the sequence GCAAAGC (SEQ ID NO: 1005);
(b) a sequence having less than or equal to 2 mismatches to the sequence of (a); or
(c) a sequence having less than or equal to 1 mismatch to the sequence of (a).

[0160] Embodiment 127 is the gRNA of any one of embodiments 96-107, wherein position US3 is substituted, optionally with a G.

[0161] Embodiment 128 is the gRNA of any one of embodiments 96-107 or 127, wherein position US4 is substituted, optionally with a C.

[0162] Embodiment 129 is the gRNA of any one of embodiments 96-107 or 127-128, wherein position US9 is substituted, optionally with a G.

[0163] Embodiment 130 is the gRNA of any one of embodiments 96-107 or 127-129, wherein position US10 is substituted, optionally with a C.

[0164] Embodiment 131 is the gRNA of any one of embodiments 96-107 or 127-130, wherein positions US3 and US10 are substituted, optionally with a G and a C, respectively.

[0165] Embodiment 132 is the gRNA of any one of embodiments 96-107 or 127-131, wherein positions US4 and US9 are substituted, optionally with a C and a G, respectively.

[0166] Embodiment 133 is the gRNA of embodiment 132, wherein positions US3 and US10 are substituted with a G and a C, respectively, and positions US4 and US9 are substituted with a C and a G, respectively.

[0167] Embodiment 134 is the gRNA of embodiment 133, wherein position US5 is deleted.

[0168] Embodiment 135 is the gRNA of embodiment 133 or 134, wherein positions US3 and US10 are substituted with a G and a C, respectively, and positions US4 and US9 are substituted with a C and a G, respectively, and position US8 is deleted.

[0169] Embodiment 136 is the gRNA of embodiment 135, wherein positions H1-2 through H1-5 and H1-8 through H1-11 are deleted.

[0170] Embodiment 137 is the gRNA of embodiment 135 or 136, wherein the shortened upper stem region comprises:

(a) the sequence GCGCGAAGCGC (SEQ ID NO: 1008);
(b) a sequence having less than or equal to 2 mismatches to the sequence of (a); or
(c) a sequence having less than or equal to 1 mismatch to the sequence of (a).

[0171] Embodiment 138 is the gRNA of any one of embodiments 96-107 or 127-131, wherein positions US3 and US10 are substituted with a C and a G, respectively.

[0172] Embodiment 139 is the gRNA of embodiment 138, wherein positions US3 and US10 are substituted with a C and a G, respectively, and positions US4 and US9 are deleted.

[0173] Embodiment 140 is the gRNA of embodiment 139, wherein the shortened upper stem region comprises:

(a) the sequence GCGGAAACGC (SEQ ID NO: 1006);
(b) a sequence having less than or equal to 2 mismatches to the sequence of (a); or
(c) a sequence having less than or equal to 1 mismatch to the sequence of (a).

[0174] Embodiment 141 is the gRNA of any one of embodiments 96-107 or 127-131, wherein positions US3 and US10 are substituted with a G and a C, respectively, and positions US4 and US9 are deleted.

[0175] Embodiment 142 is the gRNA of embodiment 141, wherein the shortened upper stem region comprises:

(a) the sequence GCCGAAAGGC (SEQ ID NO: 1007);
(b) a sequence having less than or equal to 2 mismatches to the sequence of (a); or
(c) a sequence having less than or equal to 1 mismatch to the sequence of (a).

[0176] Embodiment 143 is the gRNA of any one of the preceding embodiments, wherein position LS6 is substituted.

[0177] Embodiment 144 is the gRNA of any one of the preceding embodiments, wherein position LS7 is substituted.

[0178] Embodiment 145 is the gRNA of any one of the preceding embodiments, wherein position US3 is substituted.

[0179] Embodiment 146 is the gRNA of any one of the preceding embodiments, wherein position US10 is substituted.

[0180] Embodiment 147 is the gRNA of any one of the preceding embodiments, wherein position B3 is substituted.

[0181] Embodiment 148 is the gRNA of embodiment 147, wherein position B3 is substituted with a G.

[0182] Embodiment 149 is the gRNA of any one of the preceding embodiments, wherein position N7 is substituted.

[0183] Embodiment 150 is the gRNA of embodiment 149, wherein position N7 is substituted with a C.

[0184] Embodiment 151 is the gRNA of embodiment 149, wherein position N7 is substituted with a U.

[0185] Embodiment 152 is the gRNA of any one of the preceding embodiments, wherein position N15 is substituted.

[0186] Embodiment 153 is the gRNA of embodiment 152, wherein position N15 is substituted with a C.

[0187] Embodiment 154 is the gRNA of embodiment 152, wherein position N15 is substituted with a U.

[0188] Embodiment 155 is the gRNA of any one of the preceding embodiments, wherein position N17 is substituted.

[0189] Embodiment 156 is the gRNA of embodiment 155, wherein position N17 is substituted with a G.

[0190] Embodiment 157 is the gRNA of any one of the preceding embodiments, wherein position H2-2 is substituted.

[0191] Embodiment 158 is the gRNA of any one of the preceding embodiments, wherein position H-14 is substituted.

[0192] Embodiment 159 is the gRNA of any one of the preceding embodiments, wherein positions LS 6 and LS7 are substituted.

[0193] Embodiment 160 is the gRNA of embodiment 159, wherein positions LS 6 and LS7 are substituted with a U and an A, respectively.

[0194] Embodiment 161 is the gRNA of any one of the preceding embodiments, wherein positions US3 and US10 are substituted.

[0195] Embodiment 162 is the gRNA of embodiment 161, wherein positions US3 and US10 are substituted with a G and a C, respectively.

[0196] Embodiment 163 is the gRNA of any one of the preceding embodiments, wherein positions H2-2 and H2-14 are substituted.

[0197] Embodiment 164 is the gRNA of embodiment 163, wherein positions H2-2 and H2-14 are substituted with an A and a U, respectively.

[0198] Embodiment 165 is the gRNA of embodiment 164, wherein positions H2-2 and H2-14 are substituted with a G and a C, respectively.

[0199] Embodiment 166 is the gRNA of any one of the preceding embodiments, wherein at least 2, 3, 4, 5, 6, 7, or 8 of positions US3, US10, LS6, LS7, B3, N15, N17, H2-2, and H2-14 are substituted.

[0200] Embodiment 167 is the gRNA of embodiment 166, wherein positions US3, US10, LS6, LS7, B3, N15, N17, H2-2, and H2-14 are substituted.

[0201] Embodiment 168 is the gRNA of any one of the preceding embodiments, wherein at least 2, 3, 4, or 5 of the following are true:

(a) positions US3 and US10 are substituted with a G and a C, respectively;
(b) positions LS 6 and LS7 are substituted with a U and an A, respectively;
(c) position B3 is substituted with a G;
(d) position N15 is substituted with a C;
(e) position N17 is substituted with a G; and/or
(F) positions H2-2 and H2-14 are substituted with an A and a U, respectively.

[0202] Embodiment 169 is the gRNA of embodiment, wherein positions US3 and US10 are substituted with a G and a C, respectively; positions LS 6 and LS7 are substituted with a U and an A, respectively; position B3 is substituted with a G; position N15 is substituted with a C; position N17 is substituted with a G; and positions H2-2 and H2-14 are substituted with an A and a U, respectively.

[0203] Embodiment 170 is the gRNA of any one of the preceding embodiments, wherein positions H1-4 through H1-11 are deleted.

[0204] Embodiment 171 is the gRNA of embodiment 170, wherein the shortened hairpin 1 region comprises:

(a) the sequence ACUU;
(b) a sequence having less than or equal to 2 mismatches to the sequence of (a); or
(c) a sequence having less than or equal to 1 mismatch to the sequence of (a).

[0205] Embodiment 172 is the gRNA of any one of the preceding embodiments, wherein position N2 is substituted with a C, optionally wherein positions H1-4 through H1-11 are deleted.

[0206] Embodiment 173 is the gRNA of any one of the preceding embodiments, wherein positions US1-US4 and US9-US12 are deleted, optionally wherein positions H1-4 through H1-11 are deleted.

[0207] Embodiment 174 is the gRNA of embodiment 173, wherein positions H1-2 to H1-11 are deleted.

[0208] Embodiment 175 is the gRNA of any one of the preceding embodiments, wherein positions H1-1 through H1-12 are deleted.

[0209] Embodiment 176 is the gRNA of any one of the preceding embodiments, wherein positions US2-US4 and US9-US11 are deleted.

[0210] Embodiment 177 is the gRNA of embodiment 176, wherein positions H1-2 to H1-11 are deleted.

[0211] Embodiment 178 is the gRNA of embodiment 176, wherein positions H1-1 and H1-4 through H1-12 are deleted.

[0212] Embodiment 179 is the gRNA of any one of embodiments 1-175, wherein positions US3-US5 and US8-US10 are deleted.

[0213] Embodiment 180 is the gRNA of any one of embodiments 1-175, wherein positions US3-US4 and US7-US10 are deleted.

[0214] Embodiment 181 is the gRNA of any one of embodiments 1-175, wherein positions US3-US10 are deleted.

[0215] Embodiment 182 is the gRNA of any one of embodiments 1-175, wherein positions US2-US5 and US8-US11 are deleted.

[0216] Embodiment 183 is the gRNA of any one of embodiments 1-175, wherein positions US2-US6 and US8-US11 are deleted.

[0217] Embodiment 184 is the gRNA of any one of embodiments 1-175, wherein positions US2-US11 are deleted.

[0218] Embodiment 185 is the gRNA of any one of embodiments 1-175, wherein positions US1-US5 and US8-US12 are deleted.

[0219] Embodiment 186 is the gRNA of any one of embodiments 1-175, wherein positions US1-US5 and US7-US12 are deleted.

[0220] Embodiment 187 is the gRNA of any one of the preceding embodiments, wherein position H2-15 is deleted.

[0221] Embodiment 188 is the gRNA of embodiment 187, wherein positions H2-14 and H2-15 are deleted.

[0222] Embodiment 189 is the gRNA of any one of the preceding embodiments, wherein position N6 is deleted, optionally wherein positions H1-4 through H1-11 are deleted.

[0223] Embodiment 190 is the gRNA of any one of the preceding embodiments, wherein position LS6 is substituted, optionally with a C.

[0224] Embodiment 191 is the gRNA of any one of the preceding embodiments, wherein position B3 is substituted, optionally with a C.

[0225] Embodiment 192 is the gRNA of any one of the preceding embodiments, wherein position N1 is substituted, optionally with a C.

[0226] Embodiment 193 is the gRNA of any one of the preceding embodiments, wherein position N7 is substituted, optionally with a G.

[0227] Embodiment 194 is the gRNA of any one of the preceding embodiments, wherein position N15 is substituted, optionally with a G.

[0228] Embodiment 195 is the gRNA of any one of the preceding embodiments, wherein position N17 is substituted with a non-pyrimidine, optionally with a G.

[0229] Embodiment 196 is the gRNA of any one of the preceding embodiments, wherein the gRNA is an sgRNA.

[0230] Embodiment 197 is the gRNA of any one of embodiments 1-195, which the gRNA is a crRNA or dgRNA.

[0231] Embodiment 198 is the gRNA of any one of the preceding embodiments, wherein the gRNA comprises a 5′ end modification.

[0232] Embodiment 199 is the gRNA of any one of the preceding embodiments, wherein the gRNA comprises a 3′ end modification.

[0233] Embodiment 200 is the gRNA of any one of the preceding embodiments, wherein the gRNA comprises a 5′ end modification and a 3′ end modification.

[0234] Embodiment 201 is the gRNA of any one of the preceding embodiments, wherein the gRNA comprises a 3′ tail.

[0235] Embodiment 202 is the gRNA of embodiment 201, wherein the 3′ tail comprises about 1-2, 1-3, 1-4, 1-5, 1-7, 1-10, at least 1-5, at least 1-3, at least 1-4, at least 1-5, at least 1-5, at least 1-7, or at least 1-10 nucleotides.

[0236] Embodiment 203 is the gRNA of embodiment 202, wherein the 3′ tail comprises 1, 2, 3, 4, 5, 6, 7, 8, 9, or 10 nucleotides.

[0237] Embodiment 204 is the gRNA of any one of the preceding embodiments, wherein the gRNA does not comprise a 3′ tail.

[0238] Embodiment 205 is the gRNA of any one of the preceding embodiments, comprising a modification in the hairpin region.

[0239] Embodiment 206 is the gRNA of any one of the preceding embodiments, comprising a 3′ end modification, and a modification in the hairpin region.

[0240] Embodiment 207 is the gRNA of any one of the preceding embodiments, comprising a 3′ end modification, a modification in the hairpin region, and a 5′ end modification.

[0241] Embodiment 208 is the gRNA of any one of the preceding embodiments, comprising a 5′ end modification, and a modification in the hairpin region.

[0242] Embodiment 209 is the gRNA of any one of the preceding embodiments, further comprising a guide region.

[0243] Embodiment 210 is the gRNA of any one of the preceding embodiments, wherein the 3′ and/or 5′ end modification comprises a protective end modification, such as a modified nucleotide selected from 2′-O-methyl (2′-OMe) modified nucleotide, 2′-O-(2-methoxyethyl) (2′-O-moe) modified nucleotide, a 2′-fluoro (2′-F) modified nucleotide, a phosphorothioate (PS) linkage between nucleotides, an inverted abasic modified nucleotide, or combinations thereof.

[0244] Embodiment 211 is the gRNA of any one of the preceding embodiments, wherein the modification in the hairpin region comprises a modified nucleotide selected from 2′-O-methyl (2′-Ome) modified nucleotide, a 2′-fluoro (2′-F) modified nucleotide, a phosphorothioate (PS) linkage between nucleotides, or combinations thereof.

[0245] Embodiment 212 is the gRNA of any one of the preceding embodiments, wherein the 3′ and/or 5′ end modification comprises or further comprises a 2′-O-methyl (2′-Ome) modified nucleotide.

[0246] Embodiment 213 is the gRNA of any one of the preceding embodiments, wherein the 3′ and/or 5′ end modification comprises or further comprises a 2′-fluoro (2′-F) modified nucleotide.

[0247] Embodiment 214 is the gRNA of any one of the preceding embodiments, wherein the 3′ and/or 5′ end modification comprises or further comprises a phosphorothioate (PS) linkage between nucleotides.

[0248] Embodiment 215 is the gRNA of any one of the preceding embodiments, wherein the 3′ and/or 5′ end modification comprises or further comprises an inverted abasic modified nucleotide.

[0249] Embodiment 216 is the gRNA of any one of the preceding embodiments, wherein the modification in the hairpin region comprises or further comprises a 2′-O-methyl (2′-Ome) modified nucleotide.

[0250] Embodiment 217 is the gRNA of any one of the preceding embodiments, wherein the modification in the hairpin region comprises or further comprises a 2′-fluoro (2′-F) modified nucleotide.

[0251] Embodiment 218 is the gRNA of any one of the preceding embodiments, wherein the 3′ end modification comprises any of:

[0252] i. a modification of any one or more of the last 7, 6, 5, 4, 3, 2, or 1 nucleotides;

[0253] ii. one modified nucleotide;

[0254] iii. two modified nucleotides;

[0255] iv. three modified nucleotides;

[0256] v. four modified nucleotides;

[0257] vi. five modified nucleotides;

[0258] vii. six modified nucleotides; and

[0259] viii. seven modified nucleotides.

[0260] Embodiment 219 is the gRNA of any one of the preceding embodiments, wherein the 3′ end modification comprises one or more of:

[0261] i. a phosphorothioate (PS) linkage between nucleotides;

[0262] ii. a 2′-Ome modified nucleotide;

[0263] iii. a 2′-O-moe modified nucleotide;

[0264] iv. a 2′-F modified nucleotide;

[0265] v. an inverted abasic modified nucleotide; and

[0266] vi. a combination of one or more of (i.)-(v.).

[0267] Embodiment 220 is the gRNA of any one of the preceding embodiments, wherein the gRNA comprises a 3′ tail comprising one or more of:

[0268] i. a phosphorothioate (PS) linkage between nucleotides;

[0269] ii. a 2′-Ome modified nucleotide;

[0270] iii. a 2′-O-moe modified nucleotide;

[0271] iv. a 2′-F modified nucleotide;

[0272] v. an inverted abasic modified nucleotide; and

[0273] vi. a combination of one or more of (i.)-(v.).

[0274] Embodiment 221 is the gRNA any one of the preceding embodiments, wherein the gRNA comprises one or more of:

[0275] i. 1, 2, 3, 4, 5, 6, 7, 8, 9, or 10 PS linkages between nucleotides;

[0276] ii. 1, 2, 3, 4, 5, 6, 7, 8, 9, 10, 12, 14, 16, or 18 PS linkages between nucleotides;

[0277] iii. about 1-3, 1-5, 1-6, 1-7, 1-8, 1-9, or 1-10 PS linkages between nucleotides;

[0278] iv. about 1-3, 1-5, 1-6, 1-7, 1-8, 1-9, 1-10, 1-12, 1-14, 1-16, 1-18, or 1-20 PS linkages between nucleotides; and

[0279] v. PS linkages between each nucleotide.

[0280] Embodiment 222 is the gRNA of any one of the preceding embodiments, wherein the 3′ end modification comprises at least one PS linkage, and wherein one or more of:

[0281] i. there is one PS linkage, and the linkage is between the last and second to last nucleotide;

[0282] ii. there are two PS linkages between the last three nucleotides;

[0283] iii. there are PS linkages between any one or more of the last four nucleotides;

[0284] iv. there are PS linkages between any one or more of the last five nucleotides; and

[0285] v. there are PS linkages between any one or more of the last 2, 3, 4, 5, 6, 7, 8, 9, or 10 nucleotides.

[0286] Embodiment 223 is the gRNA of embodiment 222, wherein the 3′ end modification further comprises at least one 2′-OMe, 2′-O-moe, inverted abasic, or 2′-F modified nucleotide.

[0287] Embodiment 224 is the gRNA of any one of the preceding embodiments, wherein the 3′ end modification comprises:

[0288] i. a modification of one or more of the last 1-7 nucleotides, wherein the modification is a PS linkage, inverted abasic nucleotide, 2′-Ome, 2′-O-moe, 2′-F, or combinations thereof;

[0289] ii. a modification to the last nucleotide with 2′-Ome, 2′-O-moe, 2′-F, or combinations thereof, and an optional one or two PS linkages to the next nucleotide and/or the first nucleotide of the 3′ tail;

[0290] iii. a modification to the last and/or second to last nucleotide with 2′-Ome, 2′-O-moe, 2′-F, or combinations thereof, and optionally one or more PS linkages;

[0291] iv. a modification to the last, second to last, and/or third to last nucleotides with 2′-Ome, 2′-O-moe, 2′-F, or combinations thereof, and optionally one or more PS linkages;

[0292] v. a modification to the last, second to last, third to last, and/or fourth to last nucleotides with 2′-Ome, 2′-O-moe, 2′-F, or combinations thereof, and optionally one or more PS linkages; or

[0293] vi. a modification to the last, second to last, third to last, fourth to last, and/or fifth to last nucleotides with 2′-Ome, 2′-O-moe, 2′-F, or combinations thereof, and optionally one or more PS linkages.

[0294] Embodiment 225 is the gRNA of any one of the preceding embodiments, wherein the sgRNA comprise a 3′ tail, wherein the 3′ tail comprises a modification of any one or more of the nucleotides present in the 3′ tail.

[0295] Embodiment 226 is the gRNA of embodiment 225, wherein the 3′ tail is fully modified.

[0296] Embodiment 227 is the gRNA of embodiment 225, wherein the gRNA comprises a shortened hairpin 1 region and the gRNA comprises modifications at least H2-1 to H2-12.

[0297] Embodiment 228 is the gRNA of any one of the preceding embodiments, wherein the gRNA comprises any one or more of:

[0298] i. the 3′ end modification as shown in any one of SEQ ID Nos: 101-190, 301-394, or 795-798;

[0299] ii. (i) a 2′-OMe modified nucleotide at the last nucleotide of the conserved region of the gRNA, (ii) three consecutive 2′O-moe modified nucleotides immediately 5′ to the 2′-OMe modified nucleotide, and (iii) three consecutive PS linkages between the last three nucleotides of the conserved region of the gRNA;

[0300] iii. (i) five consecutive 2′-OMe modified nucleotides from the 3′ end of the 3′ terminus, and (ii) three PS linkages between the last three nucleotides of the conserved region of the gRNA;

[0301] iv. an inverted abasic modified nucleotide at the last nucleotide of the conserved region of the gRNA;

[0302] v. (i) an inverted abasic modified nucleotide at the last nucleotide of the conserved region of the gRNA, and (ii) three consecutive 2′-OMe modified nucleotides at the last three nucleotides of the conserved region of the gRNA;

[0303] vi. (i) 15 consecutive 2′-OMe modified nucleotides from the 3′ end of the 3′ terminus, (ii) five consecutive 2′-F modified nucleotides immediately 5′ to the 2′-OMe modified nucleotides, and (iii) three PS linkages between the last three nucleotides of the conserved region of the gRNA;

[0304] vii. (i) alternating 2′-OMe modified nucleotides and 2′-F modified nucleotides at the last 20 nucleotides of the conserved region of the gRNA, and (ii) three PS linkages between the last three nucleotides of the conserved region of the gRNA;

[0305] viii. (i) two or three consecutive 2′-OMe modified nucleotides, and (ii) three PS linkages between the last three nucleotides of the conserved region of the gRNA;

[0306] ix. one PS linkage between the last and next to last nucleotides of the conserved region of the gRNA; and

[0307] x. 15 or 20 consecutive 2′-OMe modified nucleotides, and (ii) three PS linkages between the last three nucleotides of the conserved region of the gRNA.

[0308] Embodiment 229 is the gRNA of any one of the preceding embodiments, wherein the 5′ end modification comprises any one or more of:

[0309] i. a modification of any one or more of nucleotides 1-7 of the guide region;

[0310] ii. one modified nucleotide;

[0311] iii. two modified nucleotides;

[0312] iv. three modified nucleotides;

[0313] v. four modified nucleotides;

[0314] vi. five modified nucleotides;

[0315] vii. six modified nucleotides; and

[0316] viii. seven modified nucleotides.

[0317] Embodiment 230 is the gRNA of any one of the preceding embodiments, wherein the 5′ end modification comprises a modification of between 1 and 7, between 1 and 5, between 1 and 4, between 1 and 3, or between 1 and 2 nucleotides.

[0318] Embodiment 231 is the gRNA of any one of the preceding embodiments, wherein the 5′ end modification comprises one or more of:

[0319] i. a phosphorothioate (PS) linkage between nucleotides;

[0320] ii. a 2′-OMe modified nucleotide;

[0321] iii. a 2′-O-moe modified nucleotide;

[0322] iv. a 2′-F modified nucleotide;

[0323] v. an inverted abasic modified nucleotide;

[0324] vi. a deoxyribonucleotide;

[0325] vii. an inosine; and

[0326] viii. combinations of one or more of (i.)-(vii.).

[0327] Embodiment 232 is the gRNA any one of the preceding embodiments, wherein the 5′ end modification comprises:

[0328] i. 1, 2, 3, 4, 5, 6, and/or 7 PS linkages between nucleotides; or

[0329] ii. about 1-2, 1-3, 1-4, 1-5, 1-6, or 1-7 PS linkages between nucleotides.

[0330] Embodiment 233 is the gRNA of any one of the preceding embodiments, wherein gRNA is an sgRNA and the 5′ end modification comprises at least one PS linkage, and wherein:

[0331] i. there is one PS linkage, and the linkage is between nucleotides 1 and 2 of the guide region;

[0332] ii. there are two PS linkages, and the linkages are between nucleotides 1 and 2, and 2 and 3 of the guide region;

[0333] iii. there are PS linkages between any one or more of nucleotides 1 and 2, 2 and 3, and 3 and 4 of the guide region;

[0334] iv. there are PS linkages between any one or more of nucleotides 1 and 2, 2 and 3, 3 and 4, and 4 and 5 of the guide region;

[0335] v. there are PS linkages between any one or more of nucleotides 1 and 2, 2 and 3, 3 and 4, 4 and 5, and 5 and 6 of the guide region;

[0336] vi. there are PS linkages between any one or more of nucleotides 1 and 2, 2 and 3, 3 and 4, 4 and 5, 5 and 6, and 6 and 7 of the guide region; or vii. there are PS linkages between any one or more of nucleotides 1 and 2, 2 and 3, 3 and 4, 4 and 5, 5 and 6, 6 and 7, and 7 and 8 of the guide region.

[0337] Embodiment 234 is the gRNA of embodiment 233, wherein the 5′ end modification further comprises at least one 2′-OMe, 2′-O-moe, inverted abasic, or 2′-F modified nucleotide.

[0338] Embodiment 235 is the gRNA of any one of the preceding embodiments, wherein the gRNA is an sgRNA comprising:

[0339] i. a modification of one or more of nucleotides 1-7 of the variable region, wherein the modification is a PS linkage, inverted abasic nucleotide, 2′-OMe, 2′-O-moe, 2′-F, 2′-H (a deoxyribonucleotide), an inosine, and/or combinations thereof;

[0340] ii. a modification to the first nucleotide of the guide region with 2′-OMe, 2′-O-moe, 2′-F, 2′-H, an inosine, or combinations thereof, and an optional PS linkage to the next nucleotide;

[0341] iii. a modification to the first and/or second nucleotide of the variable region with 2′-OMe, 2′-O-moe, 2′-F, 2′-H, an inosine, or combinations thereof, and optionally one or more PS linkages;

[0342] iv. a modification to the first, second, and/or third nucleotides of the variable region with 2′-OMe, 2′-O-moe, 2′-F, 2′-H, an inosine, or combinations thereof, and optionally one or more PS linkages;

[0343] v. a modification to the first, second, third, and/or fourth nucleotides of the variable region with 2′-OMe, 2′-O-moe, 2′-F, 2′-H, an inosine, or combinations thereof, and optionally one or more PS linkages; or

[0344] vi. a modification to the first, second, third, fourth, and/or fifth nucleotides of the variable region with 2′-OMe, 2′-O-moe, 2′-F, 2′-H, an inosine, or combinations thereof, and optionally one or more PS linkages.

[0345] Embodiment 236 is the gRNA of any one of the preceding embodiments, wherein the gRNA is an sgRNA comprising any one or more of:

[0346] i. a 5′ end modification as shown in any one of SEQ ID Nos: 101-190 or 795-798;

[0347] ii. 2′-OMe modified nucleotides at nucleotides 1, 2, and 3 of the guide region;

[0348] iii. 2′-OMe modified nucleotides at nucleotides 1, 2, and 3 of the guide region and PS linkages between nucleotides 1 and 2, 2 and 3, and 3 and 4 of the guide region;

[0349] iv. 2′-OMe modified nucleotides at nucleotides 1, 2, 3, 4, and 5 of the guide region;

[0350] v. 2′-OMe modified nucleotides at nucleotides 1, 2, 3, 4, and 5 of the guide region and PS linkages between nucleotides 1 and 2, 2 and 3, 3 and 4, 4 and 5, and 5 and 6 of the guide region;

[0351] vi. 2′O-moe modified nucleotides at nucleotides 1, 2, and 3 of the guide region;

[0352] vii. 2′O-moe modified nucleotides at nucleotides 1, 2, and 3 of the guide region and PS linkages between nucleotides 1 and 2, 2 and 3, and 3 and 4 of the guide region;

[0353] viii. an inverted abasic modified nucleotide at nucleotide 1 of the guide region;

[0354] ix. an inverted abasic modified nucleotide at nucleotide 1 of the guide region and 2′-OMe modified nucleotides at nucleotides 1, 2, and 3 of the guide region; and

[0355] x. an inverted abasic modified nucleotide at nucleotide 1 of the guide region, 2′-OMe modified nucleotides at nucleotides 1, 2, and 3 of the guide region, and PS linkages between nucleotides 1 and 2, 2 and 3, 3 and 4, 4 and 5, and 5 and 6 of the variable region.

[0356] Embodiment 237 is the gRNA of any one of the preceding embodiments, wherein the upper stem region comprises at least one modification.

[0357] Embodiment 238 is the gRNA of any one of the preceding embodiments, wherein the upper stem modification comprises any one or more of:

[0358] i. a modification to any one or more of US1-US12 in the upper stem region;

[0359] ii. a modification of at least 1, 2, 3, 4, 5, 6, 7, 8, 9, 10, 11, or all 12 nucleotides in the upper stem region; and

[0360] iii. a modification of about 1-2, 1-3, 1-4, 1-5, 1-6, 1-7, 1-8, 1-9, 1-10, or 1-12 nucleotides in the upper stem region.

[0361] Embodiment 239 is the gRNA of embodiment 238, wherein the upper stem modification comprises one or more of:

[0362] i. a 2′-OMe modified nucleotide;

[0363] ii. a 2′-O-moe modified nucleotide;

[0364] iii. a 2′-F modified nucleotide; and

[0365] iv. combinations of one or more of (i.)-(iii.).

[0366] Embodiment 240 is the gRNA of any one of the preceding embodiments, wherein the 5′ end modification comprises any one or more of:

[0367] i. a 5′ end modification as shown in any one of SEQ ID Nos: 101-190 or 795-798;

[0368] ii. 2′-OMe modified nucleotides at nucleotides 1, 2, and 3 of the variable region;

[0369] iii. 2′-OMe modified nucleotides at nucleotides 1, 2, and 3 of the variable region and PS linkages between nucleotides 1 and 2, 2 and 3, and 3 and 4 of the variable region;

[0370] iv. 2′-OMe modified nucleotides at nucleotides 1, 2, 3, 4, and 5 of the variable region;

[0371] v. 2′-OMe modified nucleotides at nucleotides 1, 2, 3, 4, and 5 of the variable region and PS linkages between nucleotides 1 and 2, 2 and 3, 3 and 4, 4 and 5, and 5 and 6 of the variable region;

[0372] vi. 2′O-moe modified nucleotides at nucleotides 1, 2, and 3 of the variable region;

[0373] vii. 2′O-moe modified nucleotides at nucleotides 1, 2, and 3 of the variable region and PS linkages between nucleotides 1 and 2, 2 and 3, and 3 and 4 of the variable region;

[0374] viii. an inverted abasic modified nucleotide at nucleotide 1 of the variable region;

[0375] ix. an inverted abasic modified nucleotide at nucleotide 1 of the variable region and 2′-OMe modified nucleotides at nucleotides 1, 2, and 3 of the variable region; and

[0376] x. an inverted abasic modified nucleotide at nucleotide 1 of the variable region, 2′-OMe modified nucleotides at nucleotides 1, 2, and 3 of the variable region, and PS linkages between nucleotides 1 and 2, 2 and 3, 3 and 4, 4 and 5, and 5 and 6 of the variable region.

[0377] Embodiment 241 is the gRNA of any one of the preceding embodiments, wherein the gRNA comprises any one or more of:

[0378] i. a 3′ end modification shown in any one of SEQ ID Nos: 101-190, 301-395, or 795-798;

[0379] ii. (i) a 2′-OMe modified nucleotide at the last nucleotide of the conserved region of an sgRNA or gRNA, (ii) three consecutive 2′O-moe modified nucleotides immediately 5′ to the 2′-OMe modified nucleotide, and (iii) three consecutive PS linkages between the last three nucleotides;

[0380] iii. (i) five consecutive 2′-OMe modified nucleotides, and (ii) three PS linkages between the last three nucleotides;

[0381] iv. an inverted abasic modified nucleotide at the last nucleotide of the conserved region of an sgRNA or gRNA;

[0382] v. (i) an inverted abasic modified nucleotide at the last nucleotide of the conserved region of an sgRNA or gRNA, and (ii) three consecutive 2′-OMe modified nucleotides at the last three nucleotides of the conserved region of an sgRNA or gRNA;

[0383] vi. (i) 15 consecutive 2′-OMe modified nucleotides, (ii) five consecutive 2′-F modified nucleotides immediately 5′ to the 2′-OMe modified nucleotides, and (iii) three PS linkages between the last three nucleotides;

[0384] vii. (i) alternating 2′-OMe modified nucleotides and 2′-F modified nucleotides at the last 20 nucleotides of the conserved region of an sgRNA or gRNA, and (ii) three PS linkages between the last three nucleotides;

[0385] viii. (i) two or three consecutive 2′-OMe modified nucleotides, and (ii) three PS linkages between the last three nucleotides;

[0386] ix. one PS linkage between the last and next to last nucleotides; and

[0387] x. 15 or 20 consecutive 2′-OMe modified nucleotides, and (ii) three PS linkages between the last three nucleotides.

[0388] Embodiment 242 is the gRNA of any one of the preceding embodiments, comprising a nucleotide sequence having at least 99, 98, 97, 96, 95, 94, 93, 92, 91, 90, 85, 80, 75, or 70% identity to the nucleotide sequence of any one of SEQ ID Nos: 1-90, 201-290, 401-490, or 601-690.

[0389] Embodiment 243 is the gRNA of any one of the preceding embodiments, comprising a nucleotide sequence having at least 99, 98, 97, 96, 95, 94, 93, 92, 91, 90, 85, 80, 75, or 70% identity to the nucleotide sequence of any one of SEQ ID Nos: 101-190, 301-394, 501-594, or 701-798, wherein the modification at each nucleotide of the gRNA that corresponds to a nucleotide of the reference sequence identifier in Table 1A is identical to or equivalent to the modification shown in the reference sequence identifier in Table 1A.

[0390] Embodiment 244 is a guide RNA comprising any of SEQ ID Nos: 1-90, 201-290, 401-490, or 601-690.

[0391] Embodiment 245 is a guide RNA comprising any of SEQ ID Nos: 101-190, 301-394, 501-594, or 701-798, including the modifications of Table 1A.

[0392] Embodiment 246 is the gRNA of any one of the preceding embodiments, comprising a YA modification at at least one guide region YA site.

[0393] Embodiment 247 is the gRNA of any one of the preceding embodiments, comprising a YA modification at at least one guide region YA site that is not a 5′ end modification.

[0394] Embodiment 248 is the gRNA of any one of the preceding embodiments, comprising a YA modification at one or more guide region YA sites, wherein the guide region YA site is at or after nucleotide 8 from the 5′ end of the 5′ terminus.

[0395] Embodiment 249 is the gRNA of any one of the preceding embodiments comprising a YA modification at one or more guide region YA sites, wherein the gRNA comprises one or more of:

[0396] i. a modification at one or more of H1-1 and H2-1;

[0397] ii. a YA modification at 1, 2, 3, 4, or 5 guide region YA sites;

[0398] iii. a YA modification at 1, 2, 3, 4, or 5 guide region YA sites, wherein the modification of at least one guide region YA site is different from any 5′ end modification of the sgRNA;

[0399] iv. a YA modification at one or more guide region YA sites, wherein the guide region YA site is at or after nucleotide 8 from the 5′ end of the 5′ terminus;

[0400] v. a YA modification at one or more guide region YA sites, wherein the guide region YA site is within nucleotides 5-end, 6-end, 7-end, 8-end, 9-end, or 10-end from the 5′ end of the 5′ terminus;

[0401] vi. a YA modification at one or more guide region YA sites, wherein the guide region YA site is within 17, 16, 15, 14, 13, 12, 11, 10, or 9 nucleotides of the 3′ terminal nucleotide of the guide region;

[0402] vii. a YA modification at a guide region YA site other than a 5′ end modification;

[0403] viii. a YA modification at two or more guide region YA sites, wherein the guide region YA sites are at or after nucleotide 8 from the 5′ end of the 5′ terminus;

[0404] ix. a YA modification at two or more guide region YA sites, wherein the two guide region YA sites are within nucleotides 5-end, 6-end, 7-end, 8-end, 9-end, or 10-end from the 5′ end of the 5′ terminus;

[0405] x. a YA modification at two or more guide region YA sites, wherein the guide region YA sites are within 17, 16, 15, 14, 13, 12, 11, 10, or 9 nucleotides of the 3′ terminal nucleotide of the guide region;

[0406] xi. a YA modification at two or more guide region YA sites other than a 5′ end modification; and

[0407] xii. a YA modification at two or more guide region YA sites, wherein the modifications of the guide region YA sites comprise a modification that at least one nucleotide located 5′ of the guide region YA site does not comprise.

[0408] Embodiment 250 is the gRNA of any one of the preceding embodiments, comprising a YA modification wherein the modification comprises 2′-fluoro, 2′-H, 2′-OMe, ENA, UNA, inosine, or PS.

[0409] Embodiment 251 is the gRNA of any one of the preceding embodiments, comprising a YA modification wherein the modification alters the structure of the dinucleotide motif to reduce RNA endonuclease activity.

[0410] Embodiment 252 is the gRNA of any one of the preceding embodiments, comprising a YA modification wherein the modification interferes with recognition or cleavage of a YA site by an RNase and/or stabilizes an RNA structure.

[0411] Embodiment 253 is the gRNA of any one of the preceding embodiments, comprising a YA modification wherein the modification comprises one or more of:

[0412] i. a ribose modification selected from 2′-O-alkyl, 2′-F, 2′-moe, 2′-F arabinose, and 2′-H (deoxyribose);

[0413] ii. a bicyclic ribose analog, such as LNA, BNA, and ENA;

[0414] iii. an unlocked nucleic acid modification;

[0415] iv. a base modification, such as inosine, pseudouridine, and 5′-methylcytosine; and

[0416] v. an internucleoside linkage modification such as phosphorothioate.

[0417] Embodiment 254 is the gRNA of any one of the preceding embodiments, comprising a YA modification at one or more conserved region YA sites.

[0418] Embodiment 255 is the gRNA of any one of the preceding embodiments, comprising a YA modification at one or more of conserved region YA sites 2, 3, 4, and 10.

[0419] Embodiment 256 is the gRNA of any one of the preceding embodiments, comprising a YA modification at one or more of conserved region YA sites 1 and 8.

[0420] Embodiment 257 is the gRNA of any one of the preceding embodiments, comprising a YA modification of conserved region YA site 1.

[0421] Embodiment 258 is the gRNA of any one of the preceding embodiments, comprising a YA modification of conserved region YA site 2.

[0422] Embodiment 259 is the gRNA of any one of the preceding embodiments, comprising a YA modification of conserved region YA site 3.

[0423] Embodiment 260 is the gRNA of any one of the preceding embodiments, comprising a YA modification of conserved region YA site 4.

[0424] Embodiment 261 is the gRNA of any one of the preceding embodiments, comprising a YA modification of conserved region YA site 5.

[0425] Embodiment 262 is the gRNA of any one of the preceding embodiments, comprising a YA modification of conserved region YA site 6.

[0426] Embodiment 263 is the gRNA of any one of the preceding embodiments, comprising a YA modification of conserved region YA site 7.

[0427] Embodiment 264 is the gRNA of any one of the preceding embodiments, comprising a YA modification of conserved region YA site 8.

[0428] Embodiment 265 is the gRNA of any one of the preceding embodiments, comprising a YA modification of conserved region YA site 9.

[0429] Embodiment 266 is the gRNA of any one of the preceding embodiments, comprising a YA modification of conserved region YA site 10.

[0430] Embodiment 267 is the gRNA of any one of the preceding embodiments, comprising one or more of:

[0431] i. YA modifications of conserved region YA sites 2, 3, 4, and 10;

[0432] ii. YA modifications of conserved region YA sites 2, 3, and 4;

[0433] iii. YA modifications of conserved region YA sites 2, 3, and 10;

[0434] iv. YA modifications of conserved region YA sites 2, 4, and 10;

[0435] v. YA modifications of conserved region YA sites 3, 4, and 10;

[0436] vi. YA modifications of conserved region YA sites 2 and 10;

[0437] vii. YA modifications of conserved region YA sites 2 and 4;

[0438] viii. YA modifications of conserved region YA sites 2 and 3;

[0439] ix. YA modifications of conserved region YA sites 3 and 4;

[0440] x. YA modifications of conserved region YA sites 3 and 10;

[0441] xi. YA modifications of conserved region YA sites 4 and 10

[0442] xii. YA modifications of conserved region YA sites 1 and 5;

[0443] xiii. YA modifications of conserved region YA sites 1 and 6;

[0444] xiv. YA modifications of conserved region YA sites 1 and 7;

[0445] xv. YA modifications of conserved region YA sites 1 and 8;

[0446] xvi. YA modifications of conserved region YA sites 1 and 9;

[0447] xvii. YA modifications of conserved region YA sites 8 and 5;

[0448] xviii. YA modifications of conserved region YA sites 8 and 6;

[0449] xix. YA modifications of conserved region YA sites 8 and 7; and

[0450] xx. YA modifications of conserved region YA sites 8 and 9;

[0451] xxi. optionally wherein the sgRNA further comprises YA modifications of conserved region YA sites 2, 3, 4, and/or 10.

[0452] Embodiment 268 is the gRNA of any one of the preceding embodiments, wherein at least one modified YA site comprises a 2′-OMe modification, optionally at the pyrimidine of the YA site.

[0453] Embodiment 269 is The gRNA of any one of the preceding embodiments, wherein at least one modified YA site comprises a 2′-fluoro modification, optionally at the pyrimidine of the YA site.

[0454] Embodiment 270 is the gRNA of any one of the preceding embodiments, wherein at least one modified YA site comprises a PS modification, optionally at the pyrimidine of the YA site.

[0455] Embodiment 271 is the gRNA of any one of the preceding embodiments, wherein the gRNA comprises a guide region that comprises modifications at at least 1, 2, 3, 4, 5, 6, 7, 8, 9, 10, 11, 12, 13, or all of the following nucleotides: 1, 2, 3, 4, 6, 7, 8, 9, 10, 11, 13, 14, 17, and 18, optionally wherein the modifications are 2′-OMe, 2′-fluoro, 2′-H, inosine, or phosphorothioate modifications.

[0456] Embodiment 272 is the gRNA of any one of the preceding embodiments, wherein the gRNA comprises a guide region that comprises modifications at nucleotides 1, 2, 3, 4, 6, 7, 8, 9, 10, 11, 13, 14, 17, and 18, optionally wherein the modifications are 2′-OMe, 2′-fluoro, 2′-H, inosine, or phosphorothioate modifications.

[0457] Embodiment 273 is the gRNA of any one of embodiments 271-272, wherein 2′-OMe modifications are not present in the guide region at nucleotides 6-11 and 13-end.

[0458] Embodiment 274 is the gRNA of any one of embodiments 271-273, wherein 2′-fluoro modifications are not present in the guide region at nucleotides 1-7, 15, 16, and 19-end.

[0459] Embodiment 275 is the gRNA of any one of embodiments 271-274, wherein phosphorothioate modifications are not present in the guide region at nucleotides 4, 5, 11-14, 17, and 18.

[0460] Embodiment 276 is the gRNA of any one of embodiments 271-275, wherein the guide region comprises an unmodified nucleotide 20.

[0461] Embodiment 277 is the gRNA of any one of embodiments 271-276, wherein the guide region consists of 20 nucleotides.

[0462] Embodiment 278 is the gRNA of any one of embodiments 271-277, wherein the guide region comprises a YA site at nucleotides 5-6 and a modification at nucleotide 5.

[0463] Embodiment 279 is the gRNA of any one of embodiments 271-278, wherein the guide region comprises a YA site at nucleotides 12-13 and a modification at nucleotide 12.

[0464] Embodiment 280 is the gRNA of any one of embodiments 271-279, wherein the guide region comprises a YA site at nucleotides 15-16 and a modification at nucleotide 15.

[0465] Embodiment 281 is the gRNA of any one of embodiments 271-280, wherein the guide region comprises a YA site at nucleotides 16-17 and a modification at nucleotide 16.

[0466] Embodiment 282 is the gRNA of any one of embodiments 271-281, wherein the guide region comprises a YA site at nucleotides 19-20 and a modification at nucleotide 19.

[0467] Embodiment 283 is the gRNA of any one of embodiments 271-277 or 279-282, wherein the guide region does not comprise a YA site at nucleotides 5-6 and nucleotide 5 is unmodified.

[0468] Embodiment 284 is the gRNA of any one of embodiments 271-278 or 280-283, wherein the guide region does not comprise a YA site at nucleotides 12-13 and nucleotide 12 is unmodified.

[0469] Embodiment 285 is the gRNA of any one of embodiments 271-279 or 281-284, wherein the guide region does not comprise a YA site at nucleotides 15-16 and nucleotide 15 is unmodified.

[0470] Embodiment 286 is the gRNA of any one of embodiments 271-280 or 282-285, wherein the guide region does not comprise a YA site at nucleotides 16-17 and nucleotide 16 is unmodified.

[0471] Embodiment 287 is the gRNA of any one of embodiments 271-281 or 283-286, wherein the guide region does not comprise a YA site at nucleotides 19-20 and nucleotide 19 is unmodified.

[0472] Embodiment 288 is the gRNA of any one of embodiments 271-287, wherein the gRNA comprises a guide region that comprises one or more of the following:

[0473] i. 2′-OMe and phosphorothioate modifications at nucleotide 1;

[0474] ii. 2′-OMe and phosphorothioate modifications at nucleotide 2;

[0475] iii. 2′-OMe and phosphorothioate modifications at nucleotide 3;

[0476] iv. a 2′-OMe modification at nucleotide 4;

[0477] v. a phosphorothioate modification at nucleotide 6;

[0478] vi. a phosphorothioate modification at nucleotide 7;

[0479] vii. 2′-fluoro and phosphorothioate modifications at nucleotide 8;

[0480] viii. 2′-fluoro and phosphorothioate modifications at nucleotide 9;

[0481] ix. 2′-fluoro and phosphorothioate modifications at nucleotide 10;

[0482] x. a 2′-fluoro modification at nucleotide 11;

[0483] xi. a 2′-fluoro modifications at nucleotide 13;

[0484] xii. a 2′-fluoro modifications at nucleotide 14;

[0485] xiii. a 2′-fluoro modifications at nucleotide 17; and

[0486] xiv. a 2′-fluoro modifications at nucleotide 18.

[0487] Embodiment 289 is the gRNA of any one of embodiments 271-288, wherein the guide region comprises each of the modifications set forth in the preceding embodiment.

[0488] Embodiment 290 is the gRNA of any one of embodiments 271-289, wherein the guide region comprises at least 1, 2, 3, or 4 of the following:

[0489] i. a 2′-OMe modification at nucleotide 5 if nucleotides 5 and 6 form a YA site;

[0490] ii. a 2′-OMe modification at nucleotide 12 if nucleotides 12 and 13 form a YA site;

[0491] iii. a phosphorothioate modification at nucleotide 15 if nucleotides 15 and 16 form a YA site;

[0492] iv. a phosphorothioate modification at nucleotide 16 if nucleotides 16 and 17 form a YA site; and

[0493] v. a phosphorothioate or 2′-fluoro modification at nucleotide 19 if nucleotides 19 and 20 form a YA site.

[0494] Embodiment 291 is the gRNA of any one of embodiments 271-290, wherein the guide region comprises a YA site at nucleotides 5-6 and a 2′-OMe modification at nucleotide 5.

[0495] Embodiment 292 is the gRNA of any one of embodiments 271-291, wherein the guide region comprises a YA site at nucleotides 12-13 and a 2′-OMe modification at nucleotide 12.

[0496] Embodiment 293 is the gRNA of any one of embodiments 271-292, wherein the guide region comprises a YA site at nucleotides 15-16 and a phosphorothioate modification at nucleotide 15.

[0497] Embodiment 294 is the gRNA of any one of embodiments 271-293, wherein the guide region comprises a YA site at nucleotides 16-17 and a phosphorothioate modification at nucleotide 16.

[0498] Embodiment 295 is the gRNA of any one of embodiments 271-294, wherein the guide region comprises a YA site at nucleotides 19-20 and a phosphorothioate modification at nucleotide 19.

[0499] Embodiment 296 is the gRNA of any one of embodiments 271-295, wherein the guide region comprises a 2′-fluoro modification at nucleotide 19.

[0500] Embodiment 297 is the gRNA of any one of embodiments 271-296, wherein the guide region comprises an unmodified nucleotide 15 or only a phosphorothioate modification at nucleotide 15.

[0501] Embodiment 298 is the gRNA of any one of embodiments 271-297, wherein the guide region comprises an unmodified nucleotide 16 or only a phosphorothioate modification at nucleotide 16.

[0502] Embodiment 299 is the gRNA of any one of the preceding embodiments, comprising:

[0503] i. a YA modification at 1, 2, 3, 4, or 5 guide region YA sites;

[0504] ii. a YA modification at 1, 2, 3, 4, or 5 guide region YA sites, wherein the modification of at least one guide region YA site is different from any 5′ end modification of the sgRNA;

[0505] iii. a YA modification at one or more guide region YA sites that are at or after nucleotide 8 from the 5′ end of the 5′ terminus;

[0506] iv. a YA modification at one or more guide region YA sites that are is within nucleotides 5-end, 6-end, 7-end, 8-end, 9-end, or 10-end from the 5′ end of the 5′ terminus;

[0507] v. a YA modification at one or more guide region YA sites that are within 17, 16, 15, 14, 13, 12, 11, 10, or 9 nucleotides of the 3′ terminal nucleotide of the guide region;

[0508] vi. a YA modification at a guide region YA site other than a 5′ end modification; or

[0509] vii. a YA modification at a guide region YA site, wherein the modification of the guide region YA site comprises a modification at at least one nucleotide located 5′ of the guide region YA site does not comprise.

[0510] Embodiment 300 is the gRNA of embodiment 300, comprising:

[0511] i. a YA modification at two or more guide region YA sites that are at or after nucleotide 8 from the 5′ end of the 5′ terminus;

[0512] ii. a YA modification at two or more guide region YA sites that are within nucleotides 5-end, 6-end, 7-end, 8-end, 9-end, or 10-end from the 5′ end of the 5′ terminus;

[0513] iii. a YA modification at two or more guide region YA sites that are within 17, 16, 15, 14, 13, 12, 11, 10, or 9 nucleotides of the 3′ terminal nucleotide of the guide region;

[0514] iv. a YA modification at two or more guide region YA sites other than a 5′ end modification; or

[0515] v. a YA modification at a two or more guide region YA sites, wherein the modifications of the guide region YA sites comprise a modification at at least one nucleotide located 5′ of the guide region YA site does not comprise.

[0516] Embodiment 301 is the gRNA of embodiment 300, comprising:

[0517] i. a YA modification at three or more guide region YA sites that are at or after nucleotide 8 from the 5′ end of the 5′ terminus;

[0518] ii. a YA modification at three or more guide region YA sites that are within nucleotides 5-end, 6-end, 7-end, 8-end, 9-end, or 10-end from the 5′ end of the 5′ terminus;

[0519] iii. a YA modification at three or more guide region YA sites that are within 17, 16, 15, 14, 13, 12, 11, 10, or 9 nucleotides of the 3′ terminal nucleotide of the guide region;

[0520] iv. a YA modification at three or more guide region YA sites other than a 5′ end modification; or

[0521] v. a YA modification at a three or more guide region YA sites, wherein the modifications of the guide region YA sites comprise a modification at at least one nucleotide located 5′ of the guide region YA site does not comprise.

[0522] Embodiment 302 is the gRNA of any one of embodiments 299-301, wherein at least 1, 2, 3, 4, 5, 6, 7, or 8 of nucleotides 8-11, 13-14, and 17-18 from the 5′ end of the 5′ terminus comprise a YA modification.

[0523] Embodiment 303 is the gRNA of embodiment 302, wherein the modification of at least 1, 2, 3, 4, 5, 6, 7, or 8 of nucleotides 8-11, 13-14, and 17-18 from the 5′ end of the 5′ terminus comprises 2′-fluoro, 2′-H, 2′-OMe, or PS.

[0524] Embodiment 304 is the gRNA of embodiment 303, wherein the modification is 2′-fluoro.

[0525] Embodiment 305 is the gRNA of embodiment 303, wherein the modification is 2′-OMe or 2′-H.

[0526] Embodiment 306 is the gRNA of embodiment 303, wherein the modification is PS.

[0527] Embodiment 307 is the gRNA of any one of embodiments 299-306, wherein at least 1, 2, 3, 4, or 5 of nucleotides 6-10 from the 5′ end of the 5′ terminus comprise a YA modification, optionally wherein the modification comprises 2′-fluoro, 2′-H, 2′-OMe, inosine, or PS.

[0528] Embodiment 308 is the gRNA of embodiment 307, wherein the modification is PS.

[0529] Embodiment 309 is the gRNA of embodiment 307, wherein the modification is 2′-fluoro or 2′-H.

[0530] Embodiment 310 is the gRNA of embodiment 307, wherein the modification is 2′-OMe.

[0531] Embodiment 311 is the gRNA of any one of embodiments 299-310, comprising any one or more of the following:

[0532] i. 1, 2, 3, 4, 5, 6, 7, or 8 YA modifications of nucleotides 8-11, 13-14, and 17-18 from the 5′ end of the 5′ terminus, wherein the YA modifications are optionally 2′-fluoro modifications, and a modification other than 2′-fluoro at one or more of nucleotides 6-10 from the 5′ terminus;

[0533] ii. a YA modification other than PS at one or more of nucleotides 8-11, 13-14, and 17-18 from the 5′ end of the 5′ terminus, and 1, 2, 3, 4, or 5 YA modifications at nucleotides 6-10 from the 5′ end of the 5′ terminus, optionally wherein the modifications are PS modifications;

[0534] iii. 1, 2, 3, 4, 5, 6, 7, or 8 YA modifications at nucleotides 8-11, 13-14, and 17-18 from the 5′ end of the 5′ terminus, wherein the YA modifications are optionally 2′-fluoro modifications, and modifications other than 2′-fluoro at nucleotides 6-10 from the 5′ end of the 5′ terminus;

[0535] iv. YA modifications other than PS at each of nucleotides 8-11, 13-14, and 17-18 from the 5′ end of the 5′ terminus, and 1, 2, 3, 4, or 5 YA modifications at nucleotides 6-10 from the 5′ end of the 5′ terminus, wherein the modifications are optionally PS modifications;

[0536] v. 1, 2, 3, 4, 5, 6, 7, or 8 YA modifications at nucleotides 8-11, 13-14, and 17-18 from the 5′ end of the 5′ terminus, wherein the YA modifications are optionally 2′-fluoro modifications, and one or more PS modification at any one of nucleotides 6-10 from the 5′ end of the 5′ terminus;

[0537] vi. at least one 2′-fluoro modification at any one of nucleotides 8-11, 13-14, and 17-18 from the 5′ end of the 5′ terminus, and 1, 2, 3, 4, or 5 YA modifications of nucleotides 6-10 from the 5′ end of the 5′ terminus, wherein the modifications are optionally PS modifications;

[0538] vii. 1, 2, 3, 4, 5, 6, 7, or 8 YA modifications of nucleotides 8-11, 13-14, and 17-18 from the 5′ end of the 5′ terminus, wherein the YA modifications are optionally 2′-fluoro modifications, and a PS modification at each of nucleotides 6-10 from the 5′ end of the 5′ terminus; or

[0539] viii. a 2′-fluoro modification at each of nucleotides 8-11, 13-14, and 17-18 from the 5′ end of the 5′ terminus, and 1, 2, 3, 4, or 5 YA modifications of nucleotides 6-10 from the 5′ end of the 5′ terminus, wherein the modifications are optionally PS modifications.

[0540] Embodiment 312 is the gRNA of any one of embodiments 299-311, wherein:

[0541] i. nucleotides 4-20 from the 5′ end of the 5′ terminus comprise at least 2, 3, or 4 modified YA sites including a first modified YA site comprising a 2′-OMe modification and a second modified YA site comprising a 2′-fluoro modification or a PS modification;

[0542] ii. nucleotides 4-20 from the 5′ end of the 5′ terminus comprise at least 2, 3, or 4 modified YA sites including a first modified YA site comprising a 2′-fluoro modification and a second modified YA site comprising a 2′-OMe modification or a PS modification;

[0543] iii. nucleotides 4-20 from the 5′ end of the 5′ terminus comprise at least 2, 3, or 4 modified YA sites including a first modified YA site comprising a PS modification and a second modified YA site comprising a 2′-OMe modification or a 2′-fluoro modification;

[0544] iv. nucleotides 4-20 from the 5′ end of the 5′ terminus comprise at least 2, 3, or 4 modified YA sites including a YA modification;

[0545] v. nucleotides 4-20 from the 5′ end of the 5′ terminus comprise at least 3 or 4 modified YA sites including a first modified YA site comprising a 2′-OMe modification, a second modified YA site comprising a 2′-fluoro modification, and a third modified YA site comprising a PS modification;

[0546] vi. nucleotides 4-20 from the 5′ end of the 5′ terminus comprise at least 3 or 4 modified YA sites including a first modified YA site comprising a 2′-OMe modification, a second modified YA site comprising a 2′-fluoro modification, a third modified YA site comprising a 2′-fluoro modification, and a fourth modified YA site comprising a PS modification;

[0547] vii. nucleotides 4-20 from the 5′ end of the 5′ terminus comprise at least 3 or 4 modified YA sites including a YA modification;

[0548] viii. nucleotides 4-20 from the 5′ end of the 5′ terminus comprise at least 4 modified YA sites including a first modified YA site comprising a 2′-OMe modification, a second modified YA site comprising a 2′-fluoro modification, a third modified YA site comprising a PS modification, and a fourth modified YA site comprising a PS modification; or

[0549] ix. nucleotides 4-40 from the 5′ end of the 5′ terminus comprise at least 4 modified YA sites including a YA modification.

[0550] Embodiment 313 is the gRNA of any one of embodiments 299-312, wherein nucleotides 4-20 from the 5′ end of the 5′ terminus comprise at least 5 modified YA sites.

[0551] Embodiment 314 is the gRNA of any one of embodiments 299-313, wherein the at least 5 modified YA sites include a fifth modified YA site comprising a PS modification, optionally wherein the third modified YA site comprises a 2′-fluoro modification.

[0552] Embodiment 315 is The gRNA of any one of embodiments 299-314, wherein the first, second, and (if applicable) third, fourth, and fifth of the at least 5 modified YA sites are arranged in the 5′ to 3′ direction.

[0553] Embodiment 316 is the gRNA of any one of embodiments 299-315, wherein the first, second, and (if applicable) third, fourth, and fifth of the at least 5 modified YA sites are not arranged in the 5′ to 3′ direction.

[0554] Embodiment 317 is the gRNA of any one of embodiments 299-316, wherein nucleotides 4-20 from the 5′ end of the 5′ terminus comprise at least 2, 3, 4, or 5 modified YA sites comprising a deoxyribonucleotide, optionally wherein the deoxyribonucleotide is the pyrimidine of the YA sites.

[0555] Embodiment 318 is the gRNA of any one of embodiments 299-317, wherein:

[0556] i. at least 1, 2, 3, or 4 of nucleotides 8-11 from the 5′ end of the 5′ terminus comprise a YA modification, which is optionally a 2′-fluoro modification;

[0557] ii. at least 1, 2, 3, 4, 5, 6, 7, or 8 of nucleotides 8-11, 13, 14, 17, and 18 from the 5′ end of the 5′ terminus comprise a YA modification, optionally wherein the YA modifications are 2′-OMe if present at nucleotides 8-11 and 2′-fluoro if present at nucleotides 13, 14, 17, or 18;

[0558] iii. at least one or both of nucleotides 17 and 18 from the 5′ end of the 5′ terminus comprise a YA modification, which is optionally a 2′-fluoro modification;

[0559] iv. at least one or both of nucleotides 17 and 18 from the 5′ end of the 5′ terminus comprise a YA modification, which is optionally a 2′-fluoro modification; or

[0560] v. at least 1, 2, 3, 4, 5, 6, 7, 8, 9, 10, 11, 12, or 13 of nucleotides 4-14, 17, and 18 from the 5′ end of the 5′ terminus comprise a YA modification, which is optionally a 2′-fluoro modification.

[0561] Embodiment 319 is the gRNA of any one of embodiments 299-318, wherein at least 1, 2, 3, 4, 5, or 6 of nucleotides 4-10 from the 5′ end of the 5′ terminus comprise a YA modification, which is optionally a 2′-OMe modification.

[0562] Embodiment 320 is the gRNA of any one of embodiments 299-319, wherein nucleotides 4-10 from the 5′ end of the 5′ terminus comprise a YA modification, which is optionally a 2′-OMe modification.

[0563] Embodiment 321 is the gRNA of any one of embodiments 299-320, wherein:

[0564] i. at least one of nucleotides 1-3 from the 5′ end of the 5′ terminus comprise a 5′ protective end modification, which is optionally a 2′-OMe modification;

[0565] ii. at least two of nucleotides 1-3 from the 5′ end of the 5′ terminus comprise a 5′ protective end modification, which is optionally a 2′-OMe modification; or

[0566] iii. each of nucleotides 1-3 from the 5′ end of the 5′ terminus comprise a 5′ protective end modification, which is optionally a 2′-OMe modification.

[0567] Embodiment 322 is the gRNA of any one of embodiments 299-321, wherein at least 1, 2, 3, 4, or 5 of nucleotides 11, 13, 14, 17, and 18 from the 5′ end of the 5′ terminus comprise a 5′ end modification, which is optionally a 2′-fluoro modification.

[0568] Embodiment 323 is the gRNA of any one of embodiments 299-322, wherein nucleotide 15 from the 5′ end of the 5′ terminus is unmodified or modified only with phosphorothioate.

[0569] Embodiment 324 is the gRNA of any one of embodiments 299-323, wherein nucleotide 16 from the 5′ terminus is unmodified or modified only with phosphorothioate.

[0570] Embodiment 325 is the gRNA of any one of 299-324, wherein nucleotide 3 from the 5′ end of the 5′ terminus is unmodified or modified only with phosphorothioate.

[0571] Embodiment 326 is the gRNA of any one of the preceding embodiments, comprising a YA modification or substitution of conserved region YA site 1.

[0572] Embodiment 327 is the gRNA of any one of the preceding embodiments, comprising a YA modification or substitution of conserved region YA site 2.

[0573] Embodiment 328 is the gRNA of any one of the preceding embodiments, comprising a YA modification or substitution of conserved region YA site 3.

[0574] Embodiment 329 is the gRNA of any one of the preceding embodiments, comprising a YA modification or substitution of conserved region YA site 4.

[0575] Embodiment 330 is the gRNA of any one of the preceding embodiments, comprising a YA modification or substitution of conserved region YA site 5.

[0576] Embodiment 331 is the gRNA of any one of the preceding embodiments, comprising a YA modification or substitution of conserved region YA site 6.

[0577] Embodiment 332 is the gRNA of any one of the preceding embodiments, comprising a YA modification or substitution of conserved region YA site 7.

[0578] Embodiment 333 is the gRNA of any one of the preceding embodiments, comprising a YA modification or substitution of conserved region YA site 8.

[0579] Embodiment 334 is the gRNA of any one of the preceding embodiments, comprising a YA modification or substitution of conserved region YA site 9.

[0580] Embodiment 335 is the gRNA of any one of the preceding embodiments, comprising a YA modification or substitution of conserved region YA site 10.

[0581] Embodiment 336 is the gRNA of any one of embodiments 326-335, comprising:

[0582] i. YA modifications of conserved region YA sites 2, 3, 4, and 10;

[0583] ii. YA modifications of conserved region YA sites 2, 3, and 4;

[0584] iii. YA modifications of conserved region YA sites 2, 3, and 10;

[0585] iv. YA modifications of conserved region YA sites 2, 4, and 10;

[0586] v. YA modifications of conserved region YA sites 3, 4, and 10;

[0587] vi. YA modifications of conserved region YA sites 2 and 10;

[0588] vii. YA modifications of conserved region YA sites 2 and 4;

[0589] viii. YA modifications of conserved region YA sites 2 and 3;

[0590] ix. YA modifications of conserved region YA sites 3 and 4;

[0591] x. YA modifications of conserved region YA sites 3 and 10; or

[0592] xi. YA modifications of conserved region YA sites 4 and 10.

[0593] Embodiment 337 is the gRNA of any one of embodiments 326-336, comprising:

[0594] i. YA modifications of conserved region YA sites 1 and 5;

[0595] ii. YA modifications of conserved region YA sites 1 and 6;

[0596] iii. YA modifications of conserved region YA sites 1 and 7;

[0597] iv. YA modifications of conserved region YA sites 1 and 8;

[0598] v. YA modifications of conserved region YA sites 1 and 9;

[0599] vi. YA modifications of conserved region YA sites 8 and 5;

[0600] vii. YA modifications of conserved region YA sites 8 and 6;

[0601] viii. YA modifications of conserved region YA sites 8 and 7; or

[0602] ix. YA modifications of conserved region YA sites 8 and 9;

[0603] optionally wherein the sgRNA further comprises YA modifications of conserved region YA sites 2, 3, 4, and 10.

[0604] Embodiment 338 is the gRNA of any one of embodiments 299-337, wherein at least one modified YA site comprises a 2′-OMe modification, optionally at the pyrimidine of the YA site.

[0605] Embodiment 339 is the gRNA of any one of embodiments 299-338, wherein at least one modified YA site comprises a 2′-fluoro modification, optionally at the pyrimidine of the YA site.

[0606] Embodiment 340 is the gRNA of any one of embodiments 299-339, wherein at least one modified YA site comprises a PS modification, optionally at the pyrimidine of the YA site.

[0607] Embodiment 341 is the gRNA of any one of embodiments 299-340, wherein at least 2, 3, 4, 5, 6, 7, 8, 9, or 10 modified YA sites comprise a 2′-OMe modification, optionally at the pyrimidines of the YA sites.

[0608] Embodiment 342 is the gRNA of any one of embodiments 299-341, wherein at least 2, 3, 4, 5, 6, 7, 8, 9, or 10 modified YA sites comprise a 2′-fluoro modification, optionally at the pyrimidines of the YA sites.

[0609] Embodiment 343 is the gRNA of any one of embodiments 299-342, wherein at least 2, 3, 4, 5, 6, 7, 8, 9, or 10 modified YA sites comprise a PS modification, optionally at the pyrimidines of the YA sites.

[0610] Embodiment 344 is the gRNA of any one of embodiments 299-343, wherein at least 2, 3, 4, 5, 6, 7, 8, 9, or 10 modified YA sites comprise a ribose modification at the 2′ position, optionally at the pyrimidines of the YA sites, and optionally chosen from a 2′-O-alkyl, 2′-H, and 2′-fluoro modification.

[0611] Embodiment 345 is the gRNA of any one of embodiments 299-344, wherein:

[0612] i. conserved region YA sites 1 and 8 comprise 2′-fluoro modifications, optionally at the pyrimidines of the YA sites;

[0613] ii. conserved region YA sites 5 and 6; 5 and 7; 5 and 9; 6 and 7; 6 and 9; 5, 6, and 7; 5, 6, and 9; 6, 7, and 9; or 5, 6, 7, and 9 comprise 2′-OMe modifications, optionally at the pyrimidines of the YA sites;

[0614] iii. conserved region YA site 1 comprises a 2′-fluoro modification and conserved region YA sites 5 and 6; 5 and 7; 5 and 9; 6 and 7; 6 and 9; 5, 6, and 7; 5, 6, and 9; 6, 7, and 9; or 5, 6, 7, and 9 comprise 2′-OMe modifications, optionally at the pyrimidines of the YA sites;

[0615] iv. conserved region YA site 8 comprises a 2′-fluoro modification and conserved region YA sites 5 and 6; 5 and 7; 5 and 9; 6 and 7; 6 and 9; 5, 6, and 7; 5, 6, and 9; 6, 7, and 9; or 5, 6, 7, and 9 comprise 2′-OMe modifications, optionally at the pyrimidines of the YA sites;

[0616] v. conserved region YA site 1 comprises a 2′-fluoro modification at the pyrimidine of the YA sites and YA sites 5 and 6; 5 and 7; 5 and 9; 6 and 7; 6 and 9; 5, 6, and 7; 5, 6, and 9; 6, 7, and 9; or 5, 6, 7, and 9 comprise 2′-OMe modifications, optionally at the pyrimidines of the YA sites;

[0617] vi. conserved region YA site 8 comprises a 2′-fluoro modification at the pyrimidine of the YA site and YA sites 5 and 6; 5 and 7; 5 and 9; 6 and 7; 6 and 9; 5, 6, and 7; 5, 6, and 9; 6, 7, and 9; or 5, 6, 7, and 9 comprise 2′-OMe modifications, optionally at the pyrimidines of the YA sites;

[0618] vii. conserved region YA sites 1 and 8 comprise 2′-fluoro modifications and conserved region YA sites 5 and 6; 5 and 7; 5 and 9; 6 and 7; 6 and 9; 5, 6, and 7; 5, 6, and 9; 6, 7, and 9; or 5, 6, 7, and 9 comprise 2′-OMe modifications, optionally at the pyrimidines of the YA sites; or

[0619] viii. conserved region YA sites 1 and 8 comprise 2′-fluoro modifications at the pyrimidines of the YA sites and conserved region YA sites 5 and 6; 5 and 7; 5 and 9; 6 and 7; 6 and 9; 5, 6, and 7; 5, 6, and 9; 6, 7, and 9; or 5, 6, 7, and 9 comprise 2′-OMe modifications, optionally at the pyrimidines of the YA sites.

[0620] Embodiment 346 is the gRNA of any one of embodiments 299-345, wherein conserved region YA sites 7 and 9 comprise YA modifications, which are optionally 2′-OMe modifications.

[0621] Embodiment 347 is the gRNA of any one of embodiments 299-346, wherein conserved region YA sites 5, 6, 7, and 9 comprise YA modifications, which are optionally 2′-OMe modifications.

[0622] Embodiment 348 is the gRNA of any one of embodiments 299-347, wherein conserved region YA site 8 comprises a 2′-fluoro modification.

[0623] Embodiment 349 is the gRNA of any one of embodiments 299-348, wherein conserved region YA site 8 comprises a deoxyribonucleotide modification.

[0624] Embodiment 350 is the gRNA of any one of embodiments 299-349, wherein conserved region YA site 8 is abolished by a base substitution, optionally wherein the base substitution eliminates the uracil of YA site 8, further optionally wherein the base substitution is a uracil to guanine substitution.

[0625] Embodiment 351 is the gRNA of any one of embodiments 299-350, wherein conserved region YA site 1 comprises a 2′-fluoro modification.

[0626] Embodiment 352 is the gRNA of any one of embodiments 299-351, wherein conserved region YA site 1 comprises a PS modification.

[0627] Embodiment 353 is the gRNA of any one of embodiments 299-352, wherein 1, 2, 3, 4, 5, 6, or 7 of LS5, LS7, LS8, LS9, LS10, LS11, and LS12 comprise modifications, optionally wherein the modifications are 2′-fluoro and/or 2′-OMe modifications.

[0628] Embodiment 354 is the gRNA of any one of embodiments 299-353, wherein modifications at LS5, LS7, LS9, and LS11, if present, comprise 2′-fluoro modifications, optionally wherein each of LS5, LS7, LS9, and LS11 comprise 2′-fluoro modifications.

[0629] Embodiment 355 is the gRNA of any one of embodiments 299-354, wherein modifications at LS8, LS10, and LS12, if present, comprise 2′-OMe modifications, optionally wherein each of LS8, LS10, and LS12 comprise 2′-OMe modifications.

[0630] Embodiment 356 is the gRNA of any one of embodiments 299-355, wherein 1, 2, 3, 4, 5, 6, 7, 8, 9, or 10 of N2, N3, N4, N5, N6, N7, N10, N11, N16, and N17 comprise modifications, which are optionally 2′-OMe modifications.

[0631] Embodiment 357 is the gRNA of any one of embodiments 299-356, wherein H2-2 comprises a modification, optionally wherein H2 is otherwise unmodified.

[0632] Embodiment 358 is the gRNA of any one of embodiments 299-357, wherein H2-2 comprises a 2′-OMe modification.

[0633] Embodiment 359 is the gRNA of any one of embodiments 299-358, wherein US3, US9, and US12 comprise modifications, optionally wherein the US is otherwise unmodified.

[0634] Embodiment 360 is the gRNA of any one of embodiments 299-359, wherein US3, US9, and US12 comprise 2′-OMe modifications.

[0635] Embodiment 361 is the gRNA of any one of embodiments 299-360, wherein nucleotides 6-10 from the 5′ end of the 5′ terminus comprise a PS modification and nucleotides 8-11, 13, 14, 17, and 18 from the 5′ end of the 5′ terminus comprise a 2′-fluoro modification.

[0636] Embodiment 362 is the gRNA of any one of embodiments 299-361, wherein each guide region YA site comprises a 2′-fluoro modification, optionally excepting nucleotides 15 and/or 16 from the 5′ end of the 5′ terminus.

[0637] Embodiment 363 is the gRNA of any one of embodiments 299-362, wherein nucleotides 4, 8, and 11 from the 5′ end of the 5′ terminus comprise YA modifications, optionally wherein nucleotide 4 comprises a 2′-OMe modification and nucleotides 8 and 11 comprise a 2′-fluoro modification.

[0638] Embodiment 364 is the gRNA of any one of embodiments 299-363, wherein 1, 2, 3, 4, 5, 6, 7, 8, 9, 10, 11, 12, 13, 14, 15, or more modified YA sites comprise a YA modification at the pyrimidine position of the YA site.

[0639] Embodiment 365 is the gRNA of embodiment 364, wherein 1, 2, 3, 4, 5, 6, 7, 8, 9, or 10 modified conserved region YA sites comprise a YA modification at the pyrimidine position of the YA site.

[0640] Embodiment 366 is the gRNA of any one of embodiments 299-365, wherein 1, 2, 3, 4, 5, 6, 7, 8, 9, 10, 11, 12, 13, 14, 15, or more modified YA sites comprise a YA modification at the adenine position of the YA site.

[0641] Embodiment 367 is the gRNA of embodiment 366, wherein 1, 2, 3, 4, 5, 6, 7, 8, 9, or 10 modified conserved region YA sites comprise a YA site modification at the adenine position of the YA site.

[0642] Embodiment 368 is the gRNA of any one of embodiments 299-367, comprising:

[0643] i. a modification of H1-1;

[0644] ii. a modification of H2-1; or

[0645] iii. modifications of H1-1 and H2-1.

[0646] Embodiment 369 is the gRNA of embodiment 368, wherein H1-1 and/or H2-1 comprises a 2′-OMe modification.

[0647] Embodiment 370 is the gRNA of embodiment 369, wherein H1-1 and/or H2-1 comprises a 2′-fluoro modification.

[0648] Embodiment 371 is the gRNA of embodiment 370, wherein H1-1 and/or H2-1 comprises a PS modification.

[0649] Embodiment 372 is the gRNA of any one of embodiments 299-371, comprising a modification at B3, optionally wherein B6 does not comprise a 2′-OMe modification or comprises a modification other than 2′-OMe.

[0650] Embodiment 373 is the gRNA of any one of embodiments 299-372, comprising a modification at B4, optionally wherein B6 does not comprise a 2′-OMe modification or comprises a modification other than 2′-OMe.

[0651] Embodiment 374 is the gRNA of any one of embodiments 299-373, comprising a modification at B5, optionally wherein B6 does not comprise a 2′-OMe modification or comprises a modification other than 2′-OMe.

[0652] Embodiment 375 is the gRNA of any one of embodiments 299-374, comprising a modification at LS10, optionally wherein LS10 comprises a modification other than 2′-fluoro.

[0653] Embodiment 376 is the gRNA of any one of embodiments 299-375, comprising a modification at N2.

[0654] Embodiment 377 is the gRNA of any one of embodiments 299-376, comprising a modification at N3.

[0655] Embodiment 378 is the gRNA of any one of embodiments 299-377, comprising a modification at N4.

[0656] Embodiment 379 is the gRNA of any one of embodiments 299-378, comprising a modification at N5.

[0657] Embodiment 380 is the gRNA of any one of embodiments 299-379, comprising a modification at N6.

[0658] Embodiment 381 is the gRNA of any one of embodiments 299-380, comprising a modification at N7.

[0659] Embodiment 382 is the gRNA of any one of embodiments 299-381, comprising a modification at N10.

[0660] Embodiment 383 is the gRNA of any one of embodiments 299-382, comprising a modification at N11.

[0661] Embodiment 384 is the gRNA of any one of embodiments 299-383, wherein:

[0662] i. nucleotide 8 from the 5′ end of the 5′ terminus does not comprise a 2′-fluoro modification;

[0663] ii. nucleotide 9 from the 5′ end of the 5′ terminus does not comprise a 2′-fluoro modification;

[0664] iii. nucleotide 10 from the 5′ end of the 5′ terminus does not comprise a 2′-fluoro modification;

[0665] iv. nucleotide 11 from the 5′ end of the 5′ terminus does not comprise a 2′-fluoro modification;

[0666] v. nucleotide 13 from the 5′ end of the 5′ terminus does not comprise a 2′-fluoro modification;

[0667] vi. nucleotide 14 from the 5′ end of the 5′ terminus does not comprise a 2′-fluoro modification;

[0668] vii. nucleotide 17 from the 5′ end of the 5′ terminus does not comprise a 2′-fluoro modification; and/or

[0669] viii. nucleotide 18 from the 5′ end of the 5′ terminus does not comprise a 2′-fluoro modification.

[0670] Embodiment 385 is the gRNA of any one of embodiments 299-384, wherein:

[0671] i. nucleotide 6 from the 5′ end of the 5′ terminus does not comprise a 2′-fluoro modification;

[0672] ii. nucleotide 7 from the 5′ end of the 5′ terminus does not comprise a 2′-fluoro modification;

[0673] iii. nucleotide 8 from the 5′ end of the 5′ terminus does not comprise a 2′-fluoro modification;

[0674] iv. nucleotide 9 from the 5′ end of the 5′ terminus does not comprise a 2′-fluoro modification; and/or

[0675] v. nucleotide 10 from the 5′ end of the 5′ terminus does not comprise a 2′-fluoro modification.

[0676] Embodiment 386 is the gRNA of any one of embodiments 299-385, wherein:

[0677] i. nucleotide 6 from the 5′ end of the 5′ terminus does not comprise a phosphorothioate linkage;

[0678] ii. nucleotide 7 from the 5′ end of the 5′ terminus does not comprise a phosphorothioate linkage;

[0679] iii. nucleotide 8 from the 5′ end of the 5′ terminus does not comprise a phosphorothioate linkage;

[0680] iv. nucleotide 9 from the 5′ end of the 5′ terminus does not comprise a phosphorothioate linkage; and/or

[0681] v. nucleotide 10 from the 5′ end of the 5′ terminus does not comprise a phosphorothioate linkage.

[0682] Embodiment 387 is the gRNA of any one of embodiments 299-386, wherein:

[0683] i. nucleotide 7 from the 5′ end of the 5′ terminus does not comprise a 2′-OMe modification;

[0684] ii. nucleotide 8 from the 5′ end of the 5′ terminus does not comprise a 2′-OMe modification;

[0685] iii. nucleotide 9 from the 5′ end of the 5′ terminus does not comprise a 2′-OMe modification; and/or

[0686] iv. nucleotide 10 from the 5′ end of the 5′ terminus does not comprise a 2′-OMe modification.

[0687] Embodiment 388 is the gRNA of any one of embodiments 299-387, wherein nucleotide 20 from the 5′ end of the 5′ terminus does not comprise a 2′-OMe modification.

[0688] Embodiment 389 is the gRNA of any one of embodiments 299-388, wherein the guide RNA comprises a 2′-fluoro modification at any one or more of nucleotides 1-11 and 13-20 from the 5′ end of the 5′ terminus and nucleotide 12 from the 5′ end of the 5′ terminus does not comprise a 2′-fluoro modification.

[0689] Embodiment 390 is the gRNA of any one of embodiments 299-389, wherein the guide RNA comprises a 2′-fluoro modification at any one or more of nucleotides 1-20 from the 5′ end of the 5′ terminus and:

[0690] i. nucleotide 11 from the 5′ end of the 5′ terminus does not comprise a 2′-fluoro modification;

[0691] ii. nucleotide 12 from the 5′ end of the 5′ terminus does not comprise a 2′-fluoro modification;

[0692] iii. nucleotide 13 from the 5′ end of the 5′ terminus does not comprise a 2′-fluoro modification;

[0693] iv. nucleotide 14 from the 5′ end of the 5′ terminus does not comprise a 2′-fluoro modification;

[0694] v. nucleotide 17 from the 5′ end of the 5′ terminus does not comprise a 2′-fluoro modification; and/or

[0695] vi. nucleotide 18 from the 5′ end of the 5′ terminus does not comprise a 2′-fluoro modification.

[0696] Embodiment 391 is the gRNA of any one of embodiments 299-390, wherein:

[0697] i. B2 does not comprise a 2′-OMe modification;

[0698] ii. B3 does not comprise a 2′-OMe modification;

[0699] iii. B4 does not comprise a 2′-OMe modification; and/or

[0700] iv. B5 does not comprise a 2′-OMe modification.

[0701] Embodiment 392 is the gRNA of any one of embodiments 299-391, wherein:

[0702] i. LS1 does not comprise a 2′-OMe modification;

[0703] ii. LS8 does not comprise a 2′-OMe modification; and/or

[0704] iii. LS10 does not comprise a 2′-OMe modification.

[0705] Embodiment 393 is the gRNA of any one of embodiments 299-392, wherein:

[0706] i. N2 does not comprise a 2′-OMe modification;

[0707] ii. N3 does not comprise a 2′-OMe modification;

[0708] iii. N4 does not comprise a 2′-OMe modification;

[0709] iv. N5 does not comprise a 2′-OMe modification;

[0710] v. N6 does not comprise a 2′-OMe modification;

[0711] vi. N7 does not comprise a 2′-OMe modification;

[0712] vii. N10 does not comprise a 2′-OMe modification;

[0713] viii. N11 does not comprise a 2′-OMe modification;

[0714] ix. N16 does not comprise a 2′-OMe modification; and/or

[0715] x. N17 does not comprise a 2′-OMe modification.

[0716] Embodiment 394 is the gRNA of any one of embodiments 299-393, wherein:

[0717] i. H1-2 does not comprise a phosphorothioate linkage;

[0718] ii. H1-3 does not comprise a phosphorothioate linkage;

[0719] iii. H1-4 does not comprise a phosphorothioate linkage;

[0720] iv. H1-5 does not comprise a phosphorothioate linkage;

[0721] v. H1-6 does not comprise a phosphorothioate linkage;

[0722] vi. H1-7 does not comprise a phosphorothioate linkage;

[0723] vii. H1-8 does not comprise a phosphorothioate linkage;

[0724] viii. H1-9 does not comprise a phosphorothioate linkage;

[0725] ix. H1-10 does not comprise a phosphorothioate linkage;

[0726] x. H2-1 does not comprise a phosphorothioate linkage;

[0727] xi. H2-2 does not comprise a phosphorothioate linkage;

[0728] xii. H2-3 does not comprise a phosphorothioate linkage;

[0729] xiii. H2-4 does not comprise a phosphorothioate linkage;

[0730] xiv. H2-5 does not comprise a phosphorothioate linkage;

[0731] xv. H2-6 does not comprise a phosphorothioate linkage;

[0732] xvi. H2-7 does not comprise a phosphorothioate linkage;

[0733] xvii. H2-8 does not comprise a phosphorothioate linkage;

[0734] xviii. H2-9 does not comprise a phosphorothioate linkage;

[0735] xix. H2-10 does not comprise a phosphorothioate linkage;

[0736] xx. H2-11 does not comprise a phosphorothioate linkage;

[0737] xxi. H2-12 does not comprise a phosphorothioate linkage;

[0738] xxii. H2-13 does not comprise a phosphorothioate linkage;

[0739] xxiii. H2-14 does not comprise a phosphorothioate linkage; and/or

[0740] xxiv. H2-15 does not comprise a phosphorothioate linkage.

[0741] Embodiment 395 is the gRNA of any one of the embodiments 299-394, wherein conserved region YA sites 1, 5, 6, 7, and 9 comprise YA modifications, which are optionally 2′-OMe modifications; and conserved region YA site 8 comprises a modification, which is optionally a 2′-fluoro modification.

[0742] Embodiment 396 is the gRNA of any one of the preceding embodiments, wherein one or more of the following are true:

[0743] i. nucleotide 4 from the 5′ end of the 5′ terminus comprises a 2′-OMe modification;

[0744] ii. nucleotides 6-10 from the 5′ end of the 5′ terminus comprise PS modifications;

[0745] iii. nucleotides 8-11, 13, 14, 17, and 18 from the 5′ end of the 5′ terminus comprise 2′-fluoro modifications;

[0746] iv. LS5, LS7, LS9, and LS11 comprise 2′-fluoro modifications;

[0747] v. LS8, LS10, and LS12 comprise 2′-OMe modifications;

[0748] vi. N2, N3, N4, N5, N6, N7, N10, N11, N16, and N17 comprise 2′-OMe modifications; and

[0749] vii. N14 comprises a 2′-fluoro modification.

[0750] Embodiment 397 is the gRNA of any one of embodiments 299-396, wherein at least one YA modification comprises a modification of the pyrimidine position of the YA site.

[0751] Embodiment 398 is the gRNA of any one of embodiments 299-397, wherein at least one YA modification comprises a modification of the adenine position of the YA site.

[0752] Embodiment 399 is the gRNA of any one of embodiments 299-398, wherein at least 2, 3, 4, 5, 6, 7, 8, 9, or 10 YA sites comprise YA modifications at the pyrimidines positions of the YA sites.

[0753] Embodiment 400 is the gRNA of any one of embodiments 299-399, wherein at least 2, 3, 4, 5, 6, 7, 8, 9, or 10 YA sites comprise YA modifications at the adenine positions of the YA sites.

[0754] Embodiment 401 is the gRNA of any one of embodiments 299-400, wherein at least one YA modification comprises a 2′-OMe modification.

[0755] Embodiment 402 is the gRNA of any one of embodiments 299-401, wherein at least 2, 3, 4, 5, 6, 7, 8, 9, or 10 YA sites comprise a 2′-OMe modification.

[0756] Embodiment 403 is the gRNA of any one of embodiments 299-402, wherein each modified conserved region YA site comprises a modification at the pyrimidine position of the YA site.

[0757] Embodiment 404 is the gRNA of any one of embodiments 299-403, wherein each modified guide region YA site, or each modified conserved region and guide region YA site, comprises a modification at the pyrimidine position of the YA site.

[0758] Embodiment 405 is the gRNA of any one of embodiments 299-404, wherein each modified conserved region YA site comprises a modification at the adenine position of the YA site.

[0759] Embodiment 406 is the gRNA of any one of embodiments 299-405, wherein each modified guide region YA site, or each modified conserved region and guide region YA site, comprises a modification at the adenine position of the YA site.

[0760] Embodiment 407 is the gRNA of any one of embodiments 299-406, which is an sgRNA comprising a modification at LS5.

[0761] Embodiment 408 is the gRNA of any one of embodiments 299-407, which is an sgRNA comprising a modification at LS7.

[0762] Embodiment 409 is the gRNA of any one of embodiments 299-408, which is an sgRNA comprising a modification at LS9, optionally wherein if LS9 is modified and LS5, LS7, and LS12 are not, then the modification of LS9 is other than 2′-fluoro.

[0763] Embodiment 410 is the gRNA of any one of embodiments 299-409, which is an sgRNA comprising a modification at LS12, optionally wherein if LS12 is modified and LS9 is not, then the modification of LS12 is other than 2′-OMe.

[0764] Embodiment 411 is the gRNA of any one of embodiments 299-410, which is an sgRNA comprising at least one YA modification that stabilizes a secondary structure, optionally wherein the secondary structure is the lower stem.

[0765] Embodiment 412 is the gRNA of any one of embodiments 299-411, which is an sgRNA comprising at least one modification of LS8 and/or LS11, optionally wherein the modification of LS8 and/or LS11 stabilizes a secondary structure.

[0766] Embodiment 413 is the gRNA of any one of embodiments 299-412, comprising a YA modification that stabilizes a secondary structure chosen from:

[0767] i. ENA;

[0768] ii. LNA; or

[0769] iii. a bicyclic ribose modification.

[0770] Embodiment 414 is the gRNA of any one of embodiments 299-413, which is an sgRNA comprising a modification at N6.

[0771] Embodiment 415 is the gRNA of any one of embodiments 299-414, which is an sgRNA comprising a modification at N14.

[0772] Embodiment 416 is the gRNA of any one of embodiments 299-415, which is an sgRNA comprising a modification at N17, optionally wherein if N17 is modified and N6 and N14 are not, then the modification of N17 is other than 2′-fluoro and other than 2′-OMe.

[0773] Embodiment 417 is the gRNA of any one of embodiments 299-416, wherein at least 1, 2, or 3 of nucleotides 1-3 from the 5′ end of the 5′ terminus comprise deoxyribonucleotides, optionally wherein nucleotides 1-3 from the 5′ end of the 5′ terminus comprise PS modifications.

[0774] Embodiment 418 is the gRNA of any one of embodiments 299-417, wherein the gRNA is an sgRNA and at least 1, 2, or 3 of nucleotides 1-3 from the 3′ end of the 3′ terminus comprise deoxyribonucleotides, optionally wherein nucleotides 2-3 from the 3′ end of the 3′ terminus comprise PS modifications.

[0775] Embodiment 419 is the gRNA of any one of embodiments 299-418, wherein the gRNA is an sgRNA and nucleotide 4 from the 3′ end of the 3′ terminus comprises a PS modification, optionally wherein nucleotide 4 from the 3′ end of the 3′ terminus comprises a 2′-OMe modification.

[0776] Embodiment 420 is the gRNA of any one of embodiments 299-419, wherein the gRNA is an sgRNA and hairpin 2 comprises deoxyribonucleotides, optionally wherein all or all but 1, 2, 3, 4, 5, 6, 7, 8, 9, or 10 nucleotides of hairpin 1 and hairpin 2 are deoxyribonucleotides.

[0777] Embodiment 421 is the gRNA of any one of embodiments 299-420, wherein the gRNA is an sgRNA and hairpin 1 and hairpin 2 comprise deoxyribonucleotides, optionally wherein all or all but 1, 2, 3, 4, 5, 6, 7, 8, 9, 10, 11, 12, or 13 nucleotides of hairpin 1 and hairpin 2 are deoxyribonucleotides.

[0778] Embodiment 422 is the gRNA of any one of embodiments 299-421, wherein the gRNA is an sgRNA and all or all but 1, 2, 3, 4, 5, 6, 7, 8, 9, 10, 11, 12, or 13 nucleotides from the beginning of hairpin 1 to the 3′ end of the sgRNA are deoxyribonucleotides, optionally wherein nucleotides 1-3 from the 3′ end of the 3′ terminus are deoxyribonucleotides.

[0779] Embodiment 423 is the gRNA of any one of embodiments 299-422, wherein the gRNA is an sgRNA and the upper stem comprises deoxyribonucleotides.

[0780] Embodiment 424 is the gRNA of any one of embodiments 299-423, wherein the gRNA is an sgRNA and all or all but 1, 2, 3, 4, 5, 6, 7, 8, 9, or 10 nucleotides of the upper stem are deoxyribonucleotides.

[0781] Embodiment 425 is the gRNA of any one of embodiments 299-424, wherein at least 1, 2, or 3 of nucleotides 1-3 from the 5′ end of the 5′ terminus comprise ENA, optionally wherein nucleotides 1-3 from the 5′ end of the 5′ terminus comprise PS modifications.

[0782] Embodiment 426 is the gRNA of any one of embodiments 299-425, wherein the gRNA is an sgRNA and at least 1, 2, or 3 of nucleotides 2-4 from the 3′ end of the 3′ terminus comprise ENA, optionally wherein nucleotides 2-3 from the 3′ end of the 3′ terminus comprise PS modifications.

[0783] Embodiment 427 is the gRNA of any one of embodiments 299-426, wherein at least 1, 2, or 3 of nucleotides 1-3 from the 5′ end of the 5′ terminus comprise UNA, optionally wherein nucleotides 1-3 from the 5′ end of the 5′ terminus comprise PS modifications.

[0784] Embodiment 428 is the gRNA of any one of embodiments 299-427, wherein the gRNA is an sgRNA and at least 1, 2, or 3 of nucleotides 2-4 from the 3′ end of the 3′ terminus comprise UNA, optionally wherein nucleotides 2-3 from the 3′ end of the 3′ terminus comprise PS modifications.

[0785] Embodiment 429 is the gRNA of any one of embodiments 299-428, wherein the gRNA is an sgRNA and nucleotide 4 from the 3′ end of the 3′ terminus comprises a PS modification, optionally wherein nucleotide 4 from the 3′ end of the 3′ terminus comprises a 2′-OMe modification.

[0786] Embodiment 430 is the gRNA of any one of embodiments 299-429, wherein the modification reduces gRNA degradation without significantly altering the ability of the guide to cleave a target nucleic acid.

[0787] Embodiment 431 is the gRNA of any one of embodiments 299-430, comprising a YA modification wherein the modification comprises 2′-fluoro, 2′-H, 2′-O-Me, ENA, UNA, or PS.

[0788] Embodiment 432 is the gRNA of any one of embodiments 299-431, comprising a YA modification wherein the modification alters the structure of the dinucleotide motif to reduce RNA endonuclease activity.

[0789] Embodiment 433 is the gRNA of any one of embodiments 299-432, comprising a YA modification wherein the modification interferes with recognition or cleavage of a YA site by an RNase and/or stabilizes an RNA structure.

[0790] Embodiment 434 is the gRNA of any one of embodiments 299-433, comprising a YA modification wherein the modification comprises one or more of:

[0791] i. a ribose modification selected from 2′-O-alkyl, 2′-F, 2′-moe, 2′-F arabinose, and 2′-H (deoxyribose);

[0792] ii. a bicyclic ribose analog, such as LNA, BNA, and ENA;

[0793] iii. an unlocked nucleic acid modification;

[0794] iv. a base modification, such as inosine, pseudouridine, and 5′-methylcytosine; and

[0795] v. an internucleoside linkage modification such as phosphorothioate.

[0796] Embodiment 435 is the gRNA of any one of the preceding embodiments, wherein the gRNA comprises a guide region that comprises a modification at nucleotide 5, optionally wherein the guide region comprises 2′-OMe modifications at nucleotides 1-4, phosphorothioate modifications at nucleotides 1-3 and 6-10, and/or 2′-F modifications at nucleotides 8-11, 13, 14, 17, and 18.

[0797] Embodiment 436 is the gRNA of any one of the preceding embodiments, wherein the gRNA comprises a guide region that comprises a modification at nucleotide 12, optionally wherein the guide region comprises 2′-OMe modifications at nucleotides 1-4, phosphorothioate modifications at nucleotides 1-3 and 6-10, and/or 2′-F modifications at nucleotides 8-11, 13, 14, 17, and 18.

[0798] Embodiment 437 is the gRNA of any one of the preceding embodiments, wherein the gRNA comprises a guide region that comprises a 2′-OMe modification at nucleotide 5 and/or nucleotide 12, optionally wherein the guide region comprises 2′-OMe modifications at nucleotides 1-4, phosphorothioate modifications at nucleotides 1-3 and 6-10, and/or 2′-F modifications at nucleotides 8-11, 13, 14, 17, and 18.

[0799] Embodiment 438 is the gRNA of any one of the preceding embodiments, wherein the gRNA comprises a guide region that comprises a 2′-F modification at nucleotide 5 and/or nucleotide 12, optionally wherein the guide region comprises 2′-OMe modifications at nucleotides 1-4, phosphorothioate modifications at nucleotides 1-3 and 6-10, and/or 2′-F modifications at nucleotides 8-11, 13, 14, 17, and 18.

[0800] Embodiment 439 is the gRNA of any one of the preceding embodiments, wherein the gRNA comprises a guide region that comprises a 2′-H modification at nucleotide 5 and/or nucleotide 12, optionally wherein the guide region comprises 2′-OMe modifications at nucleotides 1-4, phosphorothioate modifications at nucleotides 1-3 and 6-10, and/or 2′-F modifications at nucleotides 8-11, 13, 14, 17, and 18.

[0801] Embodiment 440 is the gRNA of any one of the preceding embodiments, wherein the gRNA comprises a guide region that comprises a phosphorothioate modification at nucleotide 5 and/or nucleotide 12, optionally wherein the guide region comprises 2′-OMe modifications at nucleotides 1-4, phosphorothioate modifications at nucleotides 1-3 and 6-10, and/or 2′-F modifications at nucleotides 8-11, 13, 14, 17, and 18.

[0802] Embodiment 441 is the gRNA of any one of the preceding embodiments, wherein the gRNA comprises a guide region that comprises modifications at:

[0803] i. nucleotides 8-10;

[0804] ii. nucleotides 8 and 9;

[0805] iii. nucleotides 8 and 10; or

[0806] iv. nucleotides 9 and 10,

[0807] optionally wherein the guide region comprises 2′-OMe modifications at nucleotides 1-4, phosphorothioate modifications at nucleotides 1-3 and 6-7, and/or 2′-F modifications at nucleotides 11, 13, 14, 17, and 18.

[0808] Embodiment 442 is the gRNA of any one of the preceding embodiments, wherein the gRNA comprises a guide region that comprises 2′-F modifications at:

[0809] i. nucleotides 8-10;

[0810] ii. nucleotides 8 and 9;

[0811] iii. nucleotides 8 and 10;

[0812] iv. nucleotides 9 and 10; or

[0813] v. nucleotide 8;

[0814] optionally wherein the guide region comprises 2′-OMe modifications at nucleotides 1-4, phosphorothioate modifications at nucleotides 1-3 and 6-7, and/or 2′-F modifications at nucleotides 11, 13, 14, 17, and 18.

[0815] Embodiment 443 is the gRNA of any one of the preceding embodiments, wherein the gRNA comprises a guide region that comprises 2′-F modifications at:

[0816] i. nucleotides 8-10;

[0817] ii. nucleotides 8 and 9;

[0818] iii. nucleotides 8 and 10;

[0819] iv. nucleotides 9 and 10; or

[0820] v. nucleotide 8;

[0821] wherein nucleotides 8-10 do not comprise phosphorothioate modifications, and optionally wherein the guide region comprises 2′-OMe modifications at nucleotides 1-4, phosphorothioate modifications at nucleotides 1-3 and 6-7, and/or 2′-F modifications at nucleotides 11, 13, 14, 17, and 18.

[0822] Embodiment 444 is the gRNA of any one of the preceding embodiments, wherein the gRNA comprises a guide region that comprises 2′-F modifications at nucleotides 8-10 and:

[0823] i. phosphorothioate modifications at 1, 2, or 3 of nucleotides 8-10;

[0824] ii. a phosphorothioate modification at nucleotide 8;

[0825] iii. a phosphorothioate modification at nucleotide 9;

[0826] iv. a phosphorothioate modification at nucleotide 10;

[0827] v. a phosphorothioate modification at nucleotides 8 and 9;

[0828] vi. a phosphorothioate modification at nucleotides 8 and 10;

[0829] vii. a phosphorothioate modification at nucleotides 9 and 10; or

[0830] viii. a phosphorothioate modification at nucleotides 8-10

[0831] optionally wherein the guide region comprises 2′-OMe modifications at nucleotides 1-4, phosphorothioate modifications at nucleotides 1-3 and 6-7, and/or 2′-F modifications at nucleotides 11, 13, 14, 17, and 18.

[0832] Embodiment 445 is the gRNA of any one of the preceding embodiments, wherein the gRNA comprises a guide region that comprises:

[0833] i. a 2′-F or phosphorothioate modification at nucleotides 5 and 6;

[0834] ii. a 2′-F modification at nucleotides 5 and 6;

[0835] iii. a phosphorothioate modification at nucleotides 5 and 6;

[0836] iv. a 2′-F modification at nucleotide 5 and a phosphorothioate modification at nucleotide 6; or

[0837] v. a 2′-F modification at nucleotide 6 and a phosphorothioate modification at nucleotide 5;

[0838] optionally wherein the guide region comprises 2′-OMe modifications at nucleotides 1-4, phosphorothioate modifications at nucleotides 1-3 and 7-10, and/or 2′-F modifications at nucleotides 8-11, 13, 14, 17, and 18.

[0839] Embodiment 446 is the gRNA of any one of the preceding embodiments, wherein the gRNA comprises a guide region that comprises 2′-F modifications at at least 1, 2, 3, 4, 5, or 6 of nucleotides 6-11, optionally wherein the guide region comprises 2′-OMe modifications at nucleotides 1-4, phosphorothioate modifications at nucleotides 1-3, and/or 2′-F modifications at nucleotides 13, 14, 17, and 18.

[0840] Embodiment 447 is the gRNA of any one of the preceding embodiments, wherein the gRNA comprises a guide region that comprises 2′-F modifications at at least 1, 2, 3, 4, 5, 6, 7, 8, 9, or 10 of nucleotides 1˜4 and 6-11, optionally wherein the guide region comprises phosphorothioate modifications at nucleotides 1-3 and/or 2′-F modifications at nucleotides 13, 14, 17, and 18.

[0841] Embodiment 448 is the gRNA of any one of the preceding embodiments, wherein the gRNA comprises a guide region that comprises 2′-F modifications at nucleotides 6-11, optionally wherein the guide region comprises 2′-OMe modifications at nucleotides 1-4, phosphorothioate modifications at nucleotides 1-3, and/or 2′-F modifications at nucleotides 13, 14, 17, and 18.

[0842] Embodiment 449 is the gRNA of any one of the preceding embodiments, wherein the gRNA comprises a guide region that comprises 2′-F modifications at nucleotides 1-4, optionally wherein the guide region comprises phosphorothioate modifications at nucleotides 1-3 and 6-10, and/or 2′-F modifications at nucleotides 6-11, 13, 14, 17, and 18.

[0843] Embodiment 450 is the gRNA of any one of the preceding embodiments, wherein the gRNA comprises a guide region that comprises a 2′-F modification at nucleotide 9 and not a phosphorothioate modification at nucleotide 9, optionally wherein the guide region comprises 2′-OMe modifications at nucleotides 1-4, phosphorothioate modifications at nucleotides 1-3 and 6-8 and 10, and/or 2′-F modifications at nucleotides 8, 10, 11, 13, 14, 17, and 18.

[0844] Embodiment 451 is the gRNA of any one of the preceding embodiments, wherein the gRNA comprises a guide region that does not comprise 2′-F modifications at at least 1, 2, 3, 4, 5, 6, 7, or 8 of nucleotides 8-11, 13, 14, 17, and 18, optionally wherein the guide region comprises 2′-OMe modifications at nucleotides 1˜4 and/or phosphorothioate modifications at nucleotides 1-3 and 6-10.

[0845] Embodiment 452 is the gRNA of any one of the preceding embodiments, wherein the gRNA comprises a guide region that does not comprise 2′-F modifications at nucleotides 8-11, 13, 14, 17, and 18, optionally wherein the guide region comprises 2′-OMe modifications at nucleotides 1˜4 and/or phosphorothioate modifications at nucleotides 1-3 and 6-10.

[0846] Embodiment 453 is the gRNA of any one of the preceding embodiments, wherein the gRNA comprises a guide region that comprises 2′-OMe modifications at at least 1, 2, 3, or 4 of nucleotides 9, 11, 13, and 14, optionally wherein the guide region comprises 2′-OMe modifications at nucleotides 1˜4 and/or phosphorothioate modifications at nucleotides 1-3 and 6-10.

[0847] Embodiment 454 is the gRNA of any one of the preceding embodiments, wherein the gRNA comprises a guide region that comprises 2′-OMe modifications at nucleotides 9, 11, 13, and 14, optionally wherein the guide region comprises 2′-OMe modifications at nucleotides 1˜4 and/or phosphorothioate modifications at nucleotides 1-3 and 6-10.

[0848] Embodiment 455 is the gRNA of any one of the preceding embodiments, wherein the gRNA comprises a guide region that comprises phosphorothioate modifications at one or both of nucleotides 8 and 10, optionally wherein the guide region comprises 2′-OMe modifications at nucleotides 1-4, phosphorothioate modifications at nucleotides 1-3 and 6-7, and/or 2′-F modifications at nucleotides 8-11, 13, 14, 17, and 18.

[0849] Embodiment 456 is the gRNA of any one of the preceding embodiments, wherein the gRNA comprises a guide region that comprises modifications at at least 1, 2, 3, 4, 5, 6, 7, 8, 9, 10, 11, 12, 13, or all of the following nucleotides: 1, 2, 3, 4, 6, 7, 8, 9, 10, 11, 13, 14, 17, and 18, optionally wherein the modifications are 2′-OMe, 2′-fluoro, or phosphorothioate modifications.

[0850] Embodiment 457 is the gRNA of any one of the the preceding embodiments, wherein the gRNA comprises a guide region that comprises modifications at nucleotides 1, 2, 3, 4, 6, 7, 8, 9, 10, 11, 13, 14, 17, and 18, optionally wherein the modifications are 2′-OMe, 2′-fluoro, or phosphorothioate modifications.

[0851] Embodiment 458 is the gRNA of any one of the preceding embodiments, wherein 2′-OMe modifications are not present in the guide region at nucleotides 6-11 and 13-end.

[0852] Embodiment 459 is the gRNA of any one of the preceding embodiments, wherein 2′-fluoro modifications are not present in the guide region at nucleotides 1-7, 15, 16, and 19-end.

[0853] Embodiment 460 is the gRNA of any one of the preceding embodiments, wherein phosphorothioate modifications are not present in the guide region at nucleotides 4, 5, 11-14, 17, and 18.

[0854] Embodiment 461 is the gRNA of any one of the preceding embodiments, wherein the guide region comprises an unmodified nucleotide 20.

[0855] Embodiment 462 is the gRNA of any one of the preceding embodiments, wherein the guide region consists of 20 nucleotides.

[0856] Embodiment 463 is the gRNA of any one of the preceding embodiments, wherein the guide region comprises a YA site at nucleotides 5-6 and a modification at nucleotide 5.

[0857] Embodiment 464 is the gRNA of any one of the preceding embodiments, wherein the guide region comprises a YA site at nucleotides 12-13 and a modification at nucleotide 12.

[0858] Embodiment 465 is the gRNA of any one of the preceding embodiments, wherein the guide region comprises a YA site at nucleotides 15-16 and a modification at nucleotide 15.

[0859] Embodiment 466 is the gRNA of any one of the preceding embodiments, wherein the guide region comprises a YA site at nucleotides 16-17 and a modification at nucleotide 16.

[0860] Embodiment 467 is the gRNA of any one of the preceding embodiments, wherein the guide region comprises a YA site at nucleotides 19-20 and a modification at nucleotide 19.

[0861] Embodiment 468 is the gRNA of any one of the preceding embodiments, wherein the guide region does not comprise a YA site at nucleotides 5-6 and nucleotide 5 is unmodified.

[0862] Embodiment 469 is the gRNA of any one of the preceding embodiments, wherein the guide region does not comprise a YA site at nucleotides 12-13 and nucleotide 12 is unmodified.

[0863] Embodiment 470 is the gRNA of any one of the preceding embodiments, wherein the guide region does not comprise a YA site at nucleotides 15-16 and nucleotide 15 is unmodified.

[0864] Embodiment 471 is the gRNA of any one of the preceding embodiments, wherein the guide region does not comprise a YA site at nucleotides 16-17 and nucleotide 16 is unmodified.

[0865] Embodiment 472 is the gRNA of any one of the preceding embodiments, wherein the guide region does not comprise a YA site at nucleotides 19-20 and nucleotide 19 is unmodified.

[0866] Embodiment 473 is the gRNA of any one of the preceding embodiments, wherein the gRNA comprises a guide region that comprises at least 1, 2, 3, 4, 5, 6, 7, 8, 9, 10, 11, 12, 13, or all of the following:

[0867] i. 2′-OMe and phosphorothioate modifications at nucleotide 1;

[0868] ii. 2′-OMe and phosphorothioate modifications at nucleotide 2;

[0869] iii. 2′-OMe and phosphorothioate modifications at nucleotide 3;

[0870] iv. a 2′-OMe modification at nucleotide 4;

[0871] v. a phosphorothioate modification at nucleotide 6;

[0872] vi. a phosphorothioate modification at nucleotide 7;

[0873] vii. 2′-fluoro and phosphorothioate modifications at nucleotide 8;

[0874] viii. 2′-fluoro and phosphorothioate modifications at nucleotide 9;

[0875] ix. 2′-fluoro and phosphorothioate modifications at nucleotide 10;

[0876] x. a 2′-fluoro modification at nucleotide 11;

[0877] xi. a 2′-fluoro modifications at nucleotide 13;

[0878] xii. a 2′-fluoro modifications at nucleotide 14;

[0879] xiii. a 2′-fluoro modifications at nucleotide 17; and

[0880] xiv. a 2′-fluoro modifications at nucleotide 18.

[0881] Embodiment 474 is the gRNA of any one of the preceding embodiments, wherein the guide region comprises each of the modifications set forth in the preceding embodiment.

[0882] Embodiment 475 is the gRNA of any one of the preceding embodiments, wherein the guide region comprises at least 1, 2, 3, or 4 of the following:

[0883] i. a 2′-OMe modification at nucleotide 5 if nucleotides 5 and 6 form a YA site;

[0884] ii. a 2′-OMe modification at nucleotide 12 if nucleotides 12 and 13 form a YA site;

[0885] iii. a phosphorothioate or 2′-H modification at nucleotide 15 if nucleotides 15 and 16 form a YA site;

[0886] iv. a phosphorothioate modification at nucleotide 16 if nucleotides 16 and 17 form a YA site; and

[0887] v. a phosphorothioate or 2′-fluoro modification at nucleotide 19 if nucleotides 19 and 20 form a YA site.

[0888] Embodiment 476 is the gRNA of any one of the preceding embodiments, wherein the guide region comprises a YA site at nucleotides 5-6 and a a 2′-OMe modification at nucleotide 5.

[0889] Embodiment 477 is the gRNA of any one of the preceding embodiments, wherein the guide region comprises a YA site at nucleotides 12-13 and a 2′-OMe modification at nucleotide 12.

[0890] Embodiment 478 is the gRNA of any one of the preceding embodiments, wherein the guide region comprises a YA site at nucleotides 15-16 and a phosphorothioate modification at nucleotide 15.

[0891] Embodiment 479 is the gRNA of any one of the preceding embodiments, wherein the guide region comprises a YA site at nucleotides 16-17 and a phosphorothioate modification at nucleotide 16.

[0892] Embodiment 480 is the gRNA of any one of the preceding embodiments, wherein the guide region comprises a YA site at nucleotides 19-20 and a phosphorothioate modification at nucleotide 19.

[0893] Embodiment 481 is the gRNA of any one of the preceding embodiments, wherein the guide region comprises a 2′-fluoro modification at nucleotide 19.

[0894] Embodiment 482 is the gRNA of any one of the preceding embodiments, wherein the guide region comprises an unmodified nucleotide 15 or only a phosphorothioate modification at nucleotide 15.

[0895] Embodiment 483 is the gRNA of any one of the preceding embodiments, wherein the guide region comprises an unmodified nucleotide 16 or only a phosphorothioate modification at nucleotide 16.

[0896] Embodiment 484 is an LNP composition comprising a gRNA of any one of the preceding embodiments.

[0897] Embodiment 485 is a composition comprising a gRNA of any one of embodiments 1-483 associated with a lipid nanoparticle (LNP).

[0898] Embodiment 486 is a composition comprising the gRNA of any one of embodiments 1-483, or the composition of any one of embodiments 452-453, further comprising a nuclease or an mRNA which encodes the nuclease.

[0899] Embodiment 487 is the composition of embodiment 486, wherein the nuclease is a Cas protein.

[0900] Embodiment 488 is the composition of embodiment 487, wherein the Cas protein is a

[0901] Cas9.

[0902] Embodiment 489 is the composition of embodiment 488, wherein the Cas9 is an S. pyogenes Cas9 or an S. aureus Cas9.

[0903] Embodiment 490 is the composition of any one of embodiments 485-489, wherein the nuclease is a nickase or a dCas.

[0904] Embodiment 491 is the composition of any one of embodiments 485-490, wherein the nuclease is modified.

[0905] Embodiment 492 is the composition of embodiment 491, wherein the modified nuclease comprises a nuclear localization signal (NLS).

[0906] Embodiment 493 is the composition of any one of embodiments 484-492, comprising an mRNA which encodes the nuclease.

[0907] Embodiment 494 is the composition of embodiment 493, wherein the mRNA comprises the sequence of any one of SEQ ID NOs: 1099-1127 or 1129-1146.

[0908] Embodiment 495 is a pharmaceutical formulation comprising the gRNA of any one of embodiments 1-483 or the composition of any one of embodiments 484-494 and a pharmaceutically acceptable carrier.

[0909] Embodiment 496 is a method of modifying a target DNA comprising, delivering a Cas protein or a nucleic acid encoding a Cas protein, and any one or more of the following to a cell:

[0910] i. the gRNA of any one of embodiments 1-483;

[0911] ii. the composition of any one of embodiments 484-494; and

[0912] iii. the pharmaceutical formulation of embodiment 495.

[0913] Embodiment 497 is the method of embodiment 496, wherein the method results in an insertion or deletion in a gene.

[0914] Embodiment 498 is the method of embodiment 496 or embodiment 497, further comprising delivering to the cell a template, wherein at least a part of the template incorporates into a target DNA at or near a double strand break site induced by the Cas protein.

[0915] Embodiment 499 is the gRNA of any one of embodiments 1-483, the composition of embodiments 484-494, or the pharmaceutical formulation of embodiment 495 for use in preparing a medicament for treating a disease or disorder.

[0916] Embodiment 500 is a use of the gRNA of any one of embodiments 1-483, the composition of embodiments 484-494, or the pharmaceutical formulation of embodiment 495 in the manufacture of a medicament for treating a disease or disorder.

[0917] Embodiment A1. A guide RNA (gRNA) comprising a 5′ end modification or a 3′ end modification and a conserved portion of an gRNA comprising one or more of:

[0918] (a) a shortened hairpin 1 region or a substituted and optionally shortened hairpin 1 region, wherein
[0919] (i) at least one of the following pairs of nucleotides are substituted in the substituted and optionally shortened hairpin 1 with Watson-Crick pairing nucleotides: H1-1 and H1-12, H1-2 and H1-11, H1-3 and H1-10, and/or H1-4 and H1-9, and the hairpin 1 region optionally lacks
   [0920] (aa) any one or two of H1-5 through H1-8,
   [0921] (bb) one, two, or three of the following pairs of nucleotides: H1-1 and H1-12, H1-2 and H1-11, H1-3 and H1-10 and/or H1-4 and H1-9, and/or
   [0922] (cc) 1-8 nucleotides of the hairpin 1 region; or
[0923] (ii) the shortened hairpin 1 region lacks 6-8 nucleotides, preferably 6 nucleotides; and
   [0924] (A) one or more of positions H1-1, H1-2, or H1-3 is deleted or substituted relative to SEQ ID NO: 400 and/or
   [0925] (B) one or more of positions H1-6 through H1-10 is substituted relative to SEQ ID NO: 400; or
[0926] (iii) the shortened hairpin 1 region lacks 5-10 nucleotides, preferably 5-6 nucleotides, and one or more of positions N18, H1-12, or n is substituted relative to SEQ ID NO: 400; and/or

[0927] (b) a shortened upper stem region, wherein the shortened upper stem region lacks 1-6 nucleotides and wherein the 6, 7, 8, 9, 10, or 11 nucleotides of the shortened upper stem region include less than or equal to 4 substitutions relative to SEQ ID NO: 400; and/or

[0928] (c) a substitution relative to SEQ ID NO: 400 at any one or more of LS6, LS7, US3, US10, B3, N7, N15, N17, H2-2 and H2-14, wherein the substituent nucleotide is neither a pyrimidine that is followed by an adenine, nor an adenine that is preceded by a pyrimidine; and/or

[0929] (d) an upper stem region, wherein the upper stem modification comprises a modification to any one or more of US1-US12 in the upper stem region.

[0930] Embodiment A2. The gRNA of embodiment A1, wherein position H1-1 is deleted.

[0931] Embodiment A3. The gRNA of embodiment A1, wherein position H1-1 is substituted.

[0932] Embodiment A4. The gRNA of any one of embodiments A1-A3, wherein position H1-2 is deleted.

[0933] Embodiment A5. The gRNA of any one of embodiments A1-A3, wherein position H1-2 is substituted.

[0934] Embodiment A6. The gRNA of any one of embodiments A1-A5, wherein position H1-3 is deleted.

[0935] Embodiment A7. The gRNA of any one of embodiments A1-A5, wherein position H1-3 is substituted.

[0936] Embodiment A8. The gRNA of any one of embodiments A1-A7, wherein position H1-4 is deleted.

[0937] Embodiment A9. The gRNA of any one of embodiments A1-A7, wherein position H1-5 is deleted.

[0938] Embodiment A10. The gRNA of any one of embodiments A1-A9, wherein position H1-6 is deleted.

[0939] Embodiment A11. The gRNA of any one of embodiments A1-A9, wherein position H1-6 is substituted.

[0940] Embodiment A12. The gRNA of any one of embodiments A1-A11, wherein position H1-7 is deleted.

[0941] Embodiment A13. The gRNA of any one of embodiments A1-A11, wherein position H1-7 is substituted.

[0942] Embodiment A14. The gRNA of any one of embodiments A1-A13, wherein position H1-8 is deleted.

[0943] Embodiment A15. The gRNA of any one of embodiments A1-A13, wherein position H1-8 is substituted.

[0944] Embodiment A16. The gRNA of any one of embodiments A1-A15, wherein position H1-9 is deleted.

[0945] Embodiment A17. The gRNA of any one of embodiments A1-A15, wherein position H1-9 is substituted.

[0946] Embodiment A18. The gRNA of any one of embodiments A1-A17, wherein position H1-10 is deleted.

[0947] Embodiment A19. The gRNA of any one of embodiments A1-A17, wherein position H1-10 is substituted.

[0948] Embodiment A20. The gRNA of any one of embodiments A1-A19, wherein position H1-11 is deleted.

[0949] Embodiment A21. The gRNA of any one of embodiments A1-A20, wherein position H1-12 is deleted.

[0950] Embodiment A22. The gRNA of any one of embodiments A1-A21, wherein positions H1-11 through H1-12 are deleted.

[0951] Embodiment A23. The gRNA of any one of embodiments A1-A22, wherein positions H1-7 is substituted with a G and/or H1-8 is substituted with a C.

[0952] Embodiment A24. The gRNA of any one of embodiments A1-A23, wherein positions H1-6 and/or H1-7 are substituted.

[0953] Embodiment A25. The gRNA of any one of embodiments A1-A24, wherein position H1-6 is substituted with a C and/or position H1-7 is substituted with a U.

[0954] Embodiment A26. The gRNA of any one of embodiments A1-A25, wherein positions H1-1 and/or H1-12 are substituted.

[0955] Embodiment A27. The gRNA of any one of embodiments A1-A26, wherein position H1-1 is substituted with a C and/or position H1-12 is substituted with a G.

[0956] Embodiment A28. The gRNA of any one of embodiments A1-A27, wherein position N18 is substituted.

[0957] Embodiment A29. The gRNA of embodiment A28, wherein position N18 is substituted with a C.

[0958] Embodiment A30. The gRNA of any one of embodiments A1-A29, wherein position H1-12 is substituted.

[0959] Embodiment A31. The gRNA of embodiment A30, wherein position H1-12 is substituted with a C or an A.

[0960] Embodiment A32. The gRNA of any one of embodiments A1-A31, wherein position n is substituted.

[0961] Embodiment A33. The gRNA of embodiment A32, wherein position n is substituted with an A.

[0962] Embodiment A34. The gRNA of any one of embodiments A1-A33, comprising a shortened upper stem region, wherein the shortened upper stem region lacks 1-6 nucleotides.

[0963] Embodiment A35. The gRNA of any one of embodiments A1-A34, wherein the gRNA is an sgRNA.

[0964] Embodiment A36. The gRNA of any one of embodiments A1-A35, wherein the gRNA comprises a 5′ end modification.

[0965] Embodiment A37. The gRNA of any one of embodiments A1-A36, wherein the gRNA comprises a 3′ end modification.

[0966] Embodiment A38. The gRNA of any one of embodiments A1-A37, wherein the gRNA comprises a 5′ end modification and a 3′ end modification.

[0967] Embodiment A39. The gRNA of any one of embodiments A1-A38, wherein the gRNA comprises a 3′ tail.

[0968] Embodiment A40. The gRNA of embodiment A39, wherein the 3′ tail comprises 1-2, 1-3, 1-4, 1-5, 1-7, 1-10 nucleotides or 1, 2, 3, 4, 5, 6, 7, 8, 9, or 10 nucleotides.

[0969] Embodiment A41. The gRNA of any one of embodiments A1-A38, wherein the gRNA does not comprise a 3′ tail.

[0970] Embodiment A42. The gRNA of any one of embodiments A1-A41, comprising a modification in the hairpin region.

[0971] Embodiment A43. The gRNA of embodiment A42, further comprising a 3′ end modification.

[0972] Embodiment A44. The gRNA of embodiment A42, further comprising a 3′ end modification and a 5′ end modification.

[0973] Embodiment A45. The gRNA of embodiment A42, further comprising a 5′ end modification.

[0974] Embodiment A46. The gRNA of any one of embodiments A1-A45, further comprising a guide region.

[0975] Embodiment A47. The gRNA of embodiment A46, wherein the guide region is 17, 18, 19, or 20 nucleotides in length.

[0976] Embodiment A48. The gRNA of any one of embodiments A1-A47, wherein the 3′ and/or 5′ end modification comprises a protective end modification, optionally a modified nucleotide selected from a 2′-O-methyl (2′-OMe) modified nucleotide, a 2′-O-(2-methoxyethyl) (2′-O-moe) modified nucleotide, a 2′-fluoro (2′-F) modified nucleotide, a phosphorothioate (PS) linkage between nucleotides, an inverted abasic modified nucleotide, or a combination thereof.

[0977] Embodiment A49. The gRNA of any one of embodiments A1-A48, wherein the modification in the hairpin region comprises a modified nucleotide selected from a 2′-O-methyl (2′-Ome) modified nucleotide, a 2′-fluoro (2′-F) modified nucleotide, a phosphorothioate (PS) linkage between nucleotides, or a combination thereof.

[0978] Embodiment A50. The gRNA of any one of embodiments A1-A49, wherein the 3′ and/or 5′ end modification comprises or further comprises a 2′-O-methyl (2′-Ome) modified nucleotide.

[0979] Embodiment A51. The gRNA of any one of embodiments A1-A50, wherein the 3′ and/or 5′ end modification comprises or further comprises a 2′-fluoro (2′-F) modified nucleotide.

[0980] Embodiment A52. The gRNA of any one of embodiments A1-A51, wherein the 3′ and/or 5′ end modification comprises or further comprises a phosphorothioate (PS) linkage between nucleotides.

[0981] Embodiment A53. The gRNA of any one of embodiments A1-A52, wherein the 3′ and/or 5′ end modification comprises or further comprises an inverted abasic modified nucleotide.

[0982] Embodiment A54. The gRNA of any one of embodiments A1-A53, wherein the modification in the hairpin region comprises or further comprises a 2′-O-methyl (2′-Ome) modified nucleotide.

[0983] Embodiment A55. The gRNA of any one of embodiments A1-A54, wherein the modification in the hairpin region comprises or further comprises a 2′-fluoro (2′-F) modified nucleotide.

[0984] Embodiment A56. The gRNA of any one of embodiments A1-A55, wherein the sgRNA comprise a 3′ tail, wherein the 3′ tail comprises a modification of any one or more of the nucleotides present in the 3′ tail.

[0985] Embodiment A57. The gRNA of embodiment A56, wherein the 3′ tail is fully modified.

[0986] Embodiment A58. The gRNA of any one of embodiments A1-A57, wherein the upper stem region comprises at least one modification.

[0987] Embodiment A59. The gRNA of embodiment A58, wherein the upper stem modification comprises any one or more of:
[0988] i. a modification of any one or more of US1-US12 in the upper stem region; and
[0989] ii. a modification of at least 1, 2, 3, 4, 5, 6, 7, 8, 9, 10, 11, or all 12 nucleotides in the upper stem region.

[0990] Embodiment A60. The gRNA of embodiment A59, wherein the upper stem modification comprises one or more of:
[0991] i. a 2′-OMe modified nucleotide;
[0992] ii. a 2′-O-moe modified nucleotide;
[0993] iii. a 2′-F modified nucleotide; and
[0994] iv. combinations of one or more of (i.)-(iii.).

[0995] Embodiment A61. The gRNA of any one of embodiments A1-A60, comprising a nucleotide sequence having at least 99, 98, 97, 96, 95, 94, 93, 92, 91, 90, 85, 80, 75, or 70% identity to the nucleotide sequence of any one of SEQ ID NOs: 1-98, 201-294, 401-494, 601-698, or 801-875.

[0996] Embodiment A62. The gRNA of any one of embodiments A1-A61, comprising a nucleotide sequence having at least 99, 98, 97, 96, 95, 94, 93, 92, 91, 90, 85, 80, 75, or 70% identity to the nucleotide sequence of any one of SEQ ID Nos: 101-198, 301-394, 501-594, 701-798, or 901-975, wherein the modification at each nucleotide of the gRNA that corresponds to a nucleotide of the reference sequence identifier in Table 1A is identical to or equivalent to the modification shown in the reference sequence identifier in Table 1A.

[0997] Embodiment A63. A guide RNA comprising any of SEQ ID NOs: 1-98, 201-294, 401-494, 601-698, or 801-875.

[0998] Embodiment A64. A guide RNA comprising any of SEQ ID NOs: 101-198, 301-394, 501-594, 701-798, or 901-975, including the modifications of Table 1A.

[0999] Embodiment A65. The gRNA of any one of embodiments A1-A64, comprising a YA modification of one or more guide region YA sites.

[1000] Embodiment A66. The gRNA of any one of embodiments A1-A65, comprising a YA modification wherein the modification comprises 2′-fluoro, 2′-H, 2′-OMe, ENA, UNA, inosine, or PS modification.

[1001] Embodiment A67. The gRNA of any one of embodiments A1-A66, comprising a YA modification of one or more conserved region YA sites.

[1002] Embodiment A68. The gRNA of any one of embodiments A1-A67, wherein at least one modified YA site comprises

[1003] (i) a 2′-OMe modification, optionally of the pyrimidine of the YA site;

[1004] (ii) a 2′-fluoro modification, optionally of the pyrimidine of the YA site; and/or

[1005] (iii) a PS modification, optionally of the pyrimidine of the YA site.

[1006] Embodiment A69. An LNP composition comprising a gRNA of any one of embodiments A1-A68.

[1007] Embodiment A70. A composition comprising a gRNA of any one of embodiments A1-A68 associated with a lipid nanoparticle (LNP).

[1008] Embodiment A71. A composition comprising the gRNA of any one of embodiments A1-A68, or the composition of embodiment A69 or A70, further comprising a nuclease or an mRNA which encodes the nuclease.

[1009] Embodiment A72. The composition of embodiment A71, wherein the nuclease is a Cas protein.

[1010] Embodiment A73. The composition of embodiment A72, wherein the Cas protein is a Cas9.

[1011] Embodiment A74. The composition of embodiment A73, wherein the Cas9 is an S. pyogenes Cas9 or an S. aureus Cas9.

[1012] Embodiment A75. The composition of any one of embodiments A71-A74, wherein the nuclease is a nickase or a dCas.

[1013] Embodiment A76. The composition of any one of embodiments A71-A75, wherein the nuclease is modified.

[1014] Embodiment A77. The composition of embodiment A76, wherein the modified nuclease comprises a nuclear localization signal (NLS).

[1015] Embodiment A78. The composition of any one of embodiments A71-A77, comprising an mRNA which encodes the nuclease.

[1016] Embodiment A79. The composition of embodiment A78, wherein the mRNA comprises the sequence of any one of SEQ ID NOs: 1099-1127 or 1129-1146.

[1017] Embodiment A80. A pharmaceutical formulation comprising the gRNA of any one of embodiments A1-A68 or the composition of any one of embodiments A69-A79 and a pharmaceutically acceptable carrier.

[1018] Embodiment A81. A method of modifying a target DNA comprising, delivering a Cas protein or a nucleic acid encoding a Cas protein, and any one or more of the following to a cell:
[1019] i. the gRNA of any one of embodiments A1-A68;
[1020] ii. the composition of any one of embodiments A69-A79; and
[1021] iii. the pharmaceutical formulation of embodiment A80.

[1022] Embodiment A82. The method of embodiment A81, wherein the method results in an insertion or deletion in a gene.

[1023] Embodiment A83. The method of embodiment A81 or A82, further comprising delivering to the cell a template, wherein at least a part of the template incorporates into a target DNA at or near a double strand break site induced by the Cas protein.

[1024] Embodiment A84. The gRNA of any one of embodiments A1-A68, the composition of embodiments A69-A79, or the pharmaceutical formulation of embodiment A80 for use in preparing a medicament for treating a disease or disorder.

[1025] Embodiment A85. Use of the gRNA of any one of embodiments A1-A68, the composition of embodiments A69-A79, or the pharmaceutical formulation of embodiment A80 in the manufacture of a medicament for treating a disease or disorder.

### FIGURE LEGENDS

[1026] FIG. 1A shows an exemplary sgRNA (SEQ ID NO: 801, methylation not shown) in a possible secondary structure with labels designating individual nucleotides of the conserved region of the sgRNA, including the lower stem, bulge, upper stem, nexus (the nucleotides of which can be referred to as N1 through N18, respectively, in the 5′ to 3′ direction), and the hairpin region which includes hairpin 1 and hairpin 2 regions. A nucleotide between hairpin 1 and hairpin 2 is labeled n. A guide region may be present on an sgRNA and is indicated in this figure as “(N)ₓ” preceding the conserved region of the sgRNA.

[1027] FIG. 1B shows an exemplary sgRNA constant region sequence (SEQ ID NO: 802) in a possible secondary structure and including a 20-nucleotide guide sequence represented as Neo.

[1028] FIG. 1C labels the 10 conserved region YA sites in an exemplary sgRNA sequence (SEQ ID NO: 801, methylation not shown) from 1 to 10. The numbers 25, 45, 50, 56, 64, 67, and 83 indicate the position of the pyrimidine of YA sites 1, 5, 6, 7, 8, 9, and 10 in an sgRNA with a guide region indicated as (N)ₓ, e.g., wherein x is optionally 20.

[1029] FIG. 2 shows the editing frequency of a deletion series for the indicated guides in Primary Cynomolgus Hepatocytes (PCH).

[1030] FIGS. 3A and 3B show dose response curves for % editing results from experiments in which short guides were delivered in vitro to Primary Cynomolgus Hepatocytes (PCH) using Lipofection.

[1031] FIGS. 4A and 4B show dose response curves for % editing results from experiments in which short guides were delivered in vitro to Primary Mouse Hepatocytes (PMH) using LNPs.

[1032] FIGS. 5A and 5B show dose response curves for % editing results from experiments in which short guides were delivered in vitro to Primary Cynomologus Hepatocytes (PCH) using LNPs.

[1033] FIGS. 5C and 5D show dose response curves for % editing results from experiments in which short guides were delivered in vitro to Primary Mouse Hepatocytes (PMH) using LNPs.

[1034] FIGS. 5E and 5F shows dose response curves for % editing results from experiments in which short guides were delivered in vitro to Primary Cynomologus Hepatocytes (PCH) using LNPs.

[1035] FIGS. 6A and 6B show in vivo % editing and serum TTR results, respectively, for the indicated guides.

[1036] FIGS. 7A and 7B show in vivo % editing and serum TTR results, respectively, for the indicated guides.

[1037] FIGS. 8A and 8B show in vivo % editing and serum TTR results, respectively, for the indicated guides.

[1038] FIGS. 9A and 9B show in vivo % editing and serum TTR results, respectively, for the indicated guides.

[1039] FIGS. 10A and 10B show in vivo % editing and serum TTR results, respectively, for the indicated guides.

[1040] FIGS. 11A and 11B show in vivo % editing and serum TTR results, respectively, for the indicated guides.

[1041] FIGS. 12A and 12B show in vivo % editing and serum TTR results, respectively, for the indicated guides.

### DETAILED DESCRIPTION

[1042] Provided herein are modified guide RNAs (gRNAs) for use in gene editing methods. Sequences of engineered and tested gRNAs are shown in Table 1A.

[1043] Certain of the gRNAs provided herein are modified dual guide RNAs (dgRNAs) for use in gene editing methods. Sequences of engineered and tested dgRNAs are shown in Table 1. Certain of the dgRNAs have certain modifications at YA sites in the dgRNA, including modifications in the crRNA and/or the trRNA.

[1044] Certain of the gRNAs provided herein are modified single guide RNAs (sgRNAs) for use in gene editing methods. Sequences of engineered and tested sgRNAs are shown in Table 1. Certain of the sgRNAs have certain modifications at YA sites in the sgRNA, including modifications in the crRNA portion of the sgRNA and/or the trRNA portion of the sgRNA.

[1045] This disclosure further provides uses of these gRNAs (e.g., sgRNA, dgRNA, or crRNA) to alter the genome of a target nucleic acid in vitro (e.g., cells cultured in vitro for use in ex vivo therapy or other uses of genetically edited cells) or in a cell in a subject such as a human (e.g., for use in in vivo therapy).

TABLE 1A
Table of gRNA Sequences

| | SEQ | | SEQ | |
|---|---|---|---|---|
| Guide | ID | | ID | |
| ID | NO. | sgRNA unmodified sequence | NO. | sgRNA modified sequence |
| G015631 | 1 | ACACAAAUACCAGUCCAGCGGUUUUAGAGCUAG | 101 | mA*mC*mA*CAAAUACCAGUCCAGCGGUUUUAGAGCU |
| | | AAAUAGCAAGUUAAAAUAAGGCUAGUCCGUUA | | AGAAAUAGCAAGUUAAAAUAAGGCUAGUCCGUUAUC |
| | | UCAACUAAGCACCGAGUCGGUGC | | AACUAAGCACCGAGUCGG*mU*mG*mC |
| G015632 | 2 | ACACAAAUACCAGUCCAGCGGUUUUAGAGCUAG | 102 | mA*mC*mA*CAAAUACCAGUCCAGCGGUUUUAGAGCU |
| | | AAAUAGCAAGUUAAAAUAAGGCUAGUCCGUUA | | AGAAAUAGCAAGUUAAAAUAAGGCUAGUCCGUUAUC |
| | | UCAACUCAGCACCGAGUCGGUGC | | AACUCAGCACCGAGUCGG*mU*mG*mC |
| G015633 | 3 | ACACAAAUACCAGUCCAGCGGUUUUAGAGCUAG | 103 | mA*mC*mA*CAAAUACCAGUCCAGCGGUUUUAGAGCU |
| | | AAAUAGCAAGUUAAAAUAAGGCUAGUCCGUUA | | AGAAAUAGCAAGUUAAAAUAAGGCUAGUCCGUUAUC |
| | | UCCACUUGGCACCGAGUCGGUGC | | CACUUGGCACCGAGUCGG*mU*mG*mC |
| G015634 | 4 | ACACAAAUACCAGUCCAGCGGUUUUAGAGCUAG | 104 | mA*mC*mA*CAAAUACCAGUCCAGCGGUUUUAGAGCU |
| | | AAAUAGCAAGUUAAAAUACGGCUAGUCCGUUA | | AGAAAUAGCAAGUUAAAAUACGGCUAGUCCGUUAUC |
| | | UCAACUUGGCACCGAGUCGGUGC | | AACUUGGCACCGAGUCGG*mU*mG*mC |
| G015635 | 5 | ACACAAAUACCAGUCCAGCGGUUUUAGAGCUAG | 105 | mA*mC*mA*CAAAUACCAGUCCAGCGGUUUUAGAGCU |
| | | AAAUAGCAAGUUAAAAUAAGGCUAGUCCGUUA | | AGAAAUAGCAAGUUAAAAUAAGGCUAGUCCGUUAUC |
| | | UCAAGAGCUGGCACCGAGUCGGUGC | | AAGAGCUGGCACCGAGUCGG*mU*mG*mC |
| G015636 | 6 | ACACAAAUACCAGUCCAGCGGUUUUAGAGCUAG | 106 | mA*mC*mA*CAAAUACCAGUCCAGCGGUUUUAGAGCU |
| | | AAAUAGCAAGUUAAAAUAAGGCUAGUCCGUUA | | AGAAAUAGCAAGUUAAAAUAAGGCUAGUCCGUUAUC |
| | | UCAAGAAAUGGCACCGAGUCGGUGC | | AAGAAAUGGCACCGAGUCGG*mU*mG*mC |
| G015637 | 7 | ACACAAAUACCAGUCCAGCGGUUUUAGAGCUAG | 107 | mA*mC*mA*CAAAUACCAGUCCAGCGGUUUUAGAGCU |
| | | AAAUAGCAAGUUAAAAUAAGGCUAGUCCGUUA | | AGAAAUAGCAAGUUAAAAUAAGGCUAGUCCGUUAUC |
| | | UCACGAAAGGGCACCGAGUCGGUGC | | ACGAAAGGGCACCGAGUCGG*mU*mG*mC |
| G015638 | 8 | ACACAAAUACCAGUCCAGCGGUUUUAGAGCUAG | 108 | mA*mC*mA*CAAAUACCAGUCCAGCGGUUUUAGAGCU |
| | | AAAUAGCAAGUUAAAAUAAGGCUAGUCCGUUA | | AGAAAUAGCAAGUUAAAAUAAGGCUAGUCCGUUAUC |
| | | UCAAAAAUGGCACCGAGUCGGUGC | | AAAAAUGGCACCGAGUCGG*mU*mG*mC |
| G015639 | 9 | ACACAAAUACCAGUCCAGCGGUUUUAGAGCUAG | 109 | mA*mC*mA*CAAAUACCAGUCCAGCGGUUUUAGAGCU |
| | | AAAUAGCAAGUUAAAAUAAGGCUAGUCCGUUA | | AGAAAUAGCAAGUUAAAAUAAGGCUAGUCCGUUAUC |
| | | UCAAAAGUGGCACCGAGUCGGUGC | | AAAAGUGGCACCGAGUCGG*mU*mG*mC |
| G015640 | 10 | ACACAAAUACCAGUCCAGCGGUUUUAGAGCUAG | 110 | mA*mC*mA*CAAAUACCAGUCCAGCGGUUUUAGAGCU |
| | | AAAUAGCAAGUUAAAAUAAGGCUAGUCCGUUA | | AGAAAUAGCAAGUUAAAAUAAGGCUAGUCCGUUAUC |
| | | UCAACAGUGGCACCGAGUCGGUGC | | AACAGUGGCACCGAGUCGG*mU*mG*mC |
| G015641 | 11 | ACACAAAUACCAGUCCAGCGGUUUUAGAGCUAG | 111 | mA*mC*mA*CAAAUACCAGUCCAGCGGUUUUAGAGCU |
| | | AAAUAGCAAGUUAAAAUAAGGCUAGUCCGUUA | | AGAAAUAGCAAGUUAAAAUAAGGCUAGUCCGUUAUC |
| | | UCACAAGGGCACCGAGUCGGUGC | | ACAAGGGCACCGAGUCGG*mU*mG*mC |
| G015642 | 12 | ACACAAAUACCAGUCCAGCGGUUUUAGAGCUAG | 112 | mA*mC*mA*CAAAUACCAGUCCAGCGGUUUUAGAGCU |
| | | AAAUAGCAAGUUAAAAUAAGGCUAGUCCGUUA | | AGAAAUAGCAAGUUAAAAUAAGGCUAGUCCGUUAUC |
| | | UCAAAAUGGCACCGAGUCGGUGC | | AAAAUGGCACCGAGUCGG*mU*mG*mC |
| G015643 | 13 | ACACAAAUACCAGUCCAGCGGUUUUAGAGCUAG | 113 | mA*mC*mA*CAAAUACCAGUCCAGCGGUUUUAGAGCU |
| | | AAAUAGCAAGUUAAAAUAAGGCUAGUCCGUUA | | AGAAAUAGCAAGUUAAAAUAAGGCUAGUCCGUUAUC |
| | | UCAAAGGCACCGAGUCGGUGC | | AAAGGCACCGAGUCGG*mU*mG*mC |
| G015644 | 14 | ACACAAAUACCAGUCCAGCGGUUUUAGAGCUAG | 114 | mA*mC*mA*CAAAUACCAGUCCAGCGGUUUUAGAGCU |
| | | AAAUAGCAAGUUAAAAUAAGGCUAGUCCGUUA | | AGAAAUAGCAAGUUAAAAUAAGGCUAGUCCGUUAUC |
| | | UCAAGGGCACCGAGUCGGUGC | | AAGGGCACCGAGUCGG*mU*mG*mC |
| G015645 | 15 | ACACAAAUACCAGUCCAGCGGUUUUAGAGCUAG | 115 | mA*mC*mA*CAAAUACCAGUCCAGCGGUUUUAGAGCU |
| | | AAAUAGCAAGUUAAAAUAAGGCUAGUCCGUUA | | AGAAAUAGCAAGUUAAAAUAAGGCUAGUCCGUUAUC |
| | | UCAGGCACCGAGUCGGUGC | | AGGCACCGAGUCGG*mU*mG*mC |
| G015646 | 16 | ACACAAAUACCAGUCCAGCGGUUUUAGAGCUAG | 116 | mA*mC*mA*CAAAUACCAGUCCAGCGGUUUUAGAGCU |
| | | AAUAGCAAGUUAAAAUAAGGCUAGUCCGUUAU | | AGAAUAGCAAGUUAAAAUAAGGCUAGUCCGUUAUCA |
| | | CAACUUGGCACCGAGUCGGUGC | | ACUUGGCACCGAGUCGG*mU*mG*mC |
| G015647 | 17 | ACACAAAUACCAGUCCAGCGGUUUUAGAGCGCA | 117 | mA*mC*mA*CAAAUACCAGUCCAGCGGUUUUAGAGCG |
| | | AAGCGCAAGUUAAAAUAAGGCUAGUCCGUUAU | | CAAAGCGCAAGUUAAAAUAAGGCUAGUCCGUUAUCA |
| | | CAACUUGGCACCGAGUCGGUGC | | ACUUGGCACCGAGUCGG*mU*mG*mC |
| G015648 | 18 | ACACAAAUACCAGUCCAGCGGUUUUAGAGCGCG | 118 | mA*mC*mA*CAAAUACCAGUCCAGCGGUUUUAGAGCG |
| | | AAGCGCAAGUUAAAAUAAGGCUAGUCCGUUAU | | CGAAGCGCAAGUUAAAAUAAGGCUAGUCCGUUAUCA |
| | | CAACUUGGCACCGAGUCGGUGC | | ACUUGGCACCGAGUCGG*mU*mG*mC |
| G015649 | 19 | ACACAAAUACCAGUCCAGCGGUUUUAGAGCGGA | 119 | mA*mC*mA*CAAAUACCAGUCCAGCGGUUUUAGAGCG |
| | | AACGCAAGUUAAAAUAAGGCUAGUCCGUUAUC | | GAAACGCAAGUUAAAAUAAGGCUAGUCCGUUAUCAA |
| | | AACUUGGCACCGAGUCGGUGCU | | CUUGGCACCGAGUCGGU*mG*mC*mU |
| G015650 | 20 | ACACAAAUACCAGUCCAGCGGUUUUAGAGCGGA | 120 | mA*mC*mA*CAAAUACCAGUCCAGCGGUUUUAGAGCG |
| | | AACGCAAGUUAAAAUAAGGCUAGUCCGUUAUC | | GAAACGCAAGUUAAAAUAAGGCUAGUCCGUUAUCAA |
| | | AACUUGGCACCGAGUCGGUGC | | CUUGGCACCGAGUCGG*mU*mG*mC |
| G015651 | 21 | ACACAAAUACCAGUCCAGCGGUUUUAGAGCCGA | 121 | mA*mC*mA*CAAAUACCAGUCCAGCGGUUUUAGAGCC |
| | | AAGGCAAGUUAAAAUAAGGCUAGUCCGUUAUC | | GAAAGGCAAGUUAAAAUAAGGCUAGUCCGUUAUCAA |
| | | AACUUGGCACCGAGUCGGUGC | | CUUGGCACCGAGUCGG*mU*mG*mC |
| G015652 | 22 | ACACAAAUACCAGUCCAGCGGUUUUAGAGCUGA | 122 | mA*mC*mA*CAAAUACCAGUCCAGCGGUUUUAGAGCU |
| | | AAAGCAAGUUAAAAUAAGGCUAGUCCGUUAUC | | GAAAAGCAAGUUAAAAUAAGGCUAGUCCGUUAUCAA |
| | | AACUUGGCACCGAGUCGGUGC | | CUUGGCACCGAGUCGG*mU*mG*mC |
| G015653 | 23 | ACACAAAUACCAGUCCAGCGGUUUUAGAGCGAA | 123 | mA*mC*mA*CAAAUACCAGUCCAGCGGUUUUAGAGCG |
| | | AGCAAGUUAAAAUAAGGCUAGUCCGUUAUCAA | | AAAGCAAGUUAAAAUAAGGCUAGUCCGUUAUCAACU |
| | | CUUGGCACCGAGUCGGUGC | | UGGCACCGAGUCGG*mU*mG*mC |
| G015654 | 24 | ACACAAAUACCAGUCCAGCGGUUUUAGAGCGAA | 124 | mA*mC*mA*CAAAUACCAGUCCAGCGGUUUUAGAGCG |
| | | GCAAGUUAAAAUAAGGCUAGUCCGUUAUCAAC | | AAGCAAGUUAAAAUAAGGCUAGUCCGUUAUCAACUU |
| | | UUGGCACCGAGUCGGUGC | | GGCACCGAGUCGG*mU*mG*mC |
| G015655 | 25 | ACACAAAUACCAGUCCAGCGGUUUUAGAGCAAA | 125 | mA*mC*mA*CAAAUACCAGUCCAGCGGUUUUAGAGCA |
| | | GCAAGUUAAAAUAAGGCUAGUCCGUUAUCAAC | | AAGCAAGUUAAAAUAAGGCUAGUCCGUUAUCAACUU |
| | | UUGGCACCGAGUCGGUGC | | GGCACCGAGUCGG*mU*mG*mC |
| G015656 | 26 | ACACAAAUACCAGUCCAGCGGUUUUAGAGGAAA | 126 | mA*mC*mA*CAAAUACCAGUCCAGCGGUUUUAGAGGA |
| | | CAAGUUAAAAUAAGGCUAGUCCGUUAUCAACU | | AACAAGUUAAAAUAAGGCUAGUCCGUUAUCAACUUG |
| | | UGGCACCGAGUCGGUGC | | GCACCGAGUCGG*mU*mG*mC |
| G015657 | 27 | ACACAAAUACCAGUCCAGCGGUUUUAGAGCAAG | 127 | mA*mC*mA*CAAAUACCAGUCCAGCGGUUUUAGAGCA |
| | | CAAGUUAAAAUAAGGCUAGUCCGUUAUCAACU | | AGCAAGUUAAAAUAAGGCUAGUCCGUUAUCAACUUG |
| | | UGGCACCGAGUCGGUGC | | GCACCGAGUCGG*mU*mG*mC |
| G015658 | 28 | ACACAAAUACCAGUCCAGCGGUUUUAGAGCGAG | 128 | mA*mC*mA*CAAAUACCAGUCCAGCGGUUUUAGAGCG |
| | | CAAGUUAAAAUAAGGCUAGUCCGUUAUCAACU | | AGCAAGUUAAAAUAAGGCUAGUCCGUUAUCAACUUG |
| | | UGGCACCGAGUCGGUGC | | GCACCGAGUCGG*mU*mG*mC |
| G015659 | 29 | ACACAAAUACCAGUCCAGCGGUUUUAGAGCGCA | 129 | mA*mC*mA*CAAAUACCAGUCCAGCGGUUUUAGAGCG |
| | | AGUUAAAAUAAGGCUAGUCCGUUAUCAACUUG | | CAAGUUAAAAUAAGGCUAGUCCGUUAUCAACUUGGC |
| | | GCACCGAGUCGGUGC | | ACCGAGUCGG*mU*mG*mC |
| G015660 | 30 | ACACAAAUACCAGUCCAGCGGUUUUAGAGAACA | 130 | mA*mC*mA*CAAAUACCAGUCCAGCGGUUUUAGAGAA |
| | | AGUUAAAAUAAGGCUAGUCCGUUAUCAACUUG | | CAAGUUAAAAUAAGGCUAGUCCGUUAUCAACUUGGC |
| | | GCACCGAGUCGGUGC | | ACCGAGUCGG*mU*mG*mC |
| G015661 | 31 | ACACAAAUACCAGUCCAGCGGUUUUAGAGACAA | 131 | mA*mC*mA*CAAAUACCAGUCCAGCGGUUUUAGAGAC |
| | | GUUAAAAUAAGGCUAGUCCGUUAUCAACUUGG | | AAGUUAAAAUAAGGCUAGUCCGUUAUCAACUUGGCA |
| | | CACCGAGUCGGUGC | | CCGAGUCGG*mU*mG*mC |
| G015662 | 32 | ACACAAAUACCAGUCCAGCGGUUUUAGAGCAAG | 132 | mA*mC*mA*CAAAUACCAGUCCAGCGGUUUUAGAGCA |
| | | UUAAAAUAAGGCUAGUCCGUUAUCAACUUGGC | | AGUUAAAAUAAGGCUAGUCCGUUAUCAACUUGGCAC |
| | | ACCGAGUCGGUGC | | CGAGUCGG*mU*mG*mC |
| G015663 | 33 | ACACAAAUACCAGUCCAGCGGUUUUAGAAAAAG | 133 | mA*mC*mA*CAAAUACCAGUCCAGCGGUUUUAGAAAA |
| | | UUAAAAUAAGGCUAGUCCGUUAUCAACUUGGC | | AGUUAAAAUAAGGCUAGUCCGUUAUCAACUUGGCAC |
| | | ACCGAGUCGGUGC | | CGAGUCGG*mU*mG*mC |
| G015664 | 34 | ACACAAAUACCAGUCCAGCGGUUUUAGAAAAGU | 134 | mA*mC*mA*CAAAUACCAGUCCAGCGGUUUUAGAAAA |
| | | UAAAAUAAGGCUAGUCCGUUAUCAACUUGGCAC | | GUUAAAAUAAGGCUAGUCCGUUAUCAACUUGGCACC |
| | | CGAGUCGGUGC | | GAGUCGG*mU*mG*mC |
| G015665 | 35 | ACACAAAUACCAGUCCAGCGGUUUUAGAGCUAG | 135 | mA*mC*mA*CAAAUACCAGUCCAGCGGUUUUAGAGCU |
| | | AAAUAGCAAGUUAAAAUAAGGCUAGUCCGUUA | | AGAAAUAGCAAGUUAAAAUAAGGCUAGUCCGUUAUC |
| | | UCAACUUGGCACCGAGUCGGUG | | AACUUGGCACCGAGUCG*mG*mU*mG |
| G015666 | 36 | ACACAAAUACCAGUCCAGCGGUUUUAGAGCUAG | 136 | mA*mC*mA*CAAAUACCAGUCCAGCGGUUUUAGAGCU |
| | | AAAUAGCAAGUUAAAAUAAGGCUAGUCCGUUA | | AGAAAUAGCAAGUUAAAAUAAGGCUAGUCCGUUAUC |
| | | UCAACUUGGCACCGAGUCGGU | | AACUUGGCACCGAGUC*mG*mG*mU |
| G015667 | 37 | ACACAAAUACCAGUCCAGCGGUUUUAGAGCUAG | 137 | mA*mC*mA*CAAAUACCAGUCCAGCGGUUUUAGAGCU |
| | | AAAUAGCAAGUUAAAAUAAGGCUAGUCCGUUA | | AGAAAUAGCAAGUUAAAAUAAGGCUAGUCCGUUAUC |
| | | UCAACUUGGCACCGAGUCGG | | AACUUGGCACCGAGU*mC*mG*mG |
| G015668 | 38 | ACACAAAUACCAGUCCAGCGGUUUUAGAGCUAG | 138 | mA*mC*mA*CAAAUACCAGUCCAGCGGUUUUAGAGCU |
| | | AAAUAGCAAGUUAAAAUAAGGCUAGUCCGUUA | | AGAAAUAGCAAGUUAAAAUAAGGCUAGUCCGUUAUC |
| | | UCAACUUGGCACCGAGUCG | | AACUUGGCACCGAG*mU*mC*mG |
| G015669 | 39 | ACACAAAUACCAGUCCAGCGGUUUUAGAGCUAG | 139 | mA*mC*mA*CAAAUACCAGUCCAGCGGUUUUAGAGCU |
| | | AAAUAGCAAGUUAAAAUAAGGCUAGUCCGUUA | | AGAAAUAGCAAGUUAAAAUAAGGCUAGUCCGUUAUC |
| | | UCAACUUGGCACCGAGUC | | AACUUGGCACCGA*mG*mU*mC |
| G015670 | 40 | ACACAAAUACCAGUCCAGCGGUUUUAGAGCUAG | 140 | mA*mC*mA*CAAAUACCAGUCCAGCGGUUUUAGAGCU |
| | | AAAUAGCAAGUUAAAAUAAGGCUAGUCCGUUA | | AGAAAUAGCAAGUUAAAAUAAGGCUAGUCCGUUAUC |
| | | UCAACUUGGCACCGAGU | | AACUUGGCACCG*mA*mG*mU |
| G015671 | 41 | ACACAAAUACCAGUCCAGCGGUUUUAGAGCGAA | 141 | mA*mC*mA*CAAAUACCAGUCCAGCGGUUUUAGAGCG |
| | | AGCAAGUUAAAAUAAGGCUAGUCCGUUAUCAC | | AAAGCAAGUUAAAAUAAGGCUAGUCCGUUAUCACUG |
| | | UGGCACCGAGUCGGUGC | | GCACCGAGUCGG*mU*mG*mC |
| G015672 | 42 | ACACAAAUACCAGUCCAGCGGUUUUAGAGCGAA | 142 | mA*mC*mA*CAAAUACCAGUCCAGCGGUUUUAGAGCG |
| | | AGCAAGUUAAAAUAAGGCUAGUCCGUUAUCAG | | AAAGCAAGUUAAAAUAAGGCUAGUCCGUUAUCAGGC |
| | | GCACCGAGUCGGUGC | | ACCGAGUCGG*mU*mG*mC |
| G015673 | 43 | ACACAAAUACCAGUCCAGCGGUUUUAGAGAAAA | 143 | mA*mC*mA*CAAAUACCAGUCCAGCGGUUUUAGAGAA |
| | | AGUUAAAAUAAGGCUAGUCCGUUAUCAACUUG | | AAAGUUAAAAUAAGGCUAGUCCGUUAUCAACUUGGC |
| | | GCACCGAGUCGGUGC | | ACCGAGUCGG*mU*mG*mC |
| G015674 | 44 | ACACAAAUACCAGUCCAGCGGUUUUAGAGGAAA | 144 | mA*mC*mA*CAAAUACCAGUCCAGCGGUUUUAGAGGA |
| | | CAAGUUAAAAUAAGGCUAGUCCGUUAUCAAUG | | AACAAGUUAAAAUAAGGCUAGUCCGUUAUCAAUGGC |
| | | GCACCGAGUCGGUGC | | ACCGAGUCGG*mU*mG*mC |
| G015675 | 45 | ACACAAAUACCAGUCCAGCGGUUUUAGAGAAAA | 145 | mA*mC*mA*CAAAUACCAGUCCAGCGGUUUUAGAGAA |
| | | AGUUAAAAUAAGGCUAGUCCGUUAUCAAUGGC | | AAAGUUAAAAUAAGGCUAGUCCGUUAUCAAUGGCAC |
| | | ACCGAGUCGGUGC | | CGAGUCGG*mU*mG*mC |
| G015676 | 46 | ACACAAAUACCAGUCCAGCGGUUUUAGAGGAAA | 146 | mA*mC*mA*CAAAUACCAGUCCAGCGGUUUUAGAGGA |
| | | CAAGUUAAAAUAAGGCUAGUCCGUUAUCACUG | | AACAAGUUAAAAUAAGGCUAGUCCGUUAUCACUGGC |
| | | GCACCGAGUCGGUGC | | ACCGAGUCGG*mU*mG*mC |
| G015677 | 47 | ACACAAAUACCAGUCCAGCGGUUUUAGAGAAAA | 147 | mA*mC*mA*CAAAUACCAGUCCAGCGGUUUUAGAGAA |
| | | AGUUAAAAUAAGGCUAGUCCGUUAUCAGGCACC | | AAAGUUAAAAUAAGGCUAGUCCGUUAUCAGGCACCG |
| | | GAGUCGGUGC | | AGUCGG*mU*mG*mC |
| G015678 | 48 | ACACAAAUACCAGUCCAGCGGUUUUAGAGCGAA | 148 | mA*mC*mA*CAAAUACCAGUCCAGCGGUUUUAGAGCG |
| | | AGCAAGUUAAAAUAAGGCUAGUCCGUUAUCAA | | AAAGCAAGUUAAAAUAAGGCUAGUCCGUUAUCAAGC |
| | | GCUAUGGCACCGAGUCGGUGC | | UAUGGCACCGAGUCGG*mU*mG*mC |
| G015679 | 49 | ACACAAAUACCAGUCCAGCGGUUUUAGAGCUAG | 149 | mA*mC*mA*CAAAUACCAGUCCAGCGGUUUUAGAGCU |
| | | AAAUAGCAAGUUAAAAUAAGGCAGUCCGUUAU | | AGAAAUAGCAAGUUAAAAUAAGGCAGUCCGUUAUCA |
| | | CAACUUGGCACCGAGUCGGUGC | | ACUUGGCACCGAGUCGG*mU*mG*mC |
| G015680 | 50 | ACACAAAUACCAGUCCAGCGGUUUUAGAGCUAG | 150 | mA*mC*mA*CAAAUACCAGUCCAGCGGUUUUAGAGCU |
| | | AAAUAGCAAGUUAAAAUAAGGCUGUCCGUUAU | | AGAAAUAGCAAGUUAAAAUAAGGCUGUCCGUUAUCA |
| | | CAACUUGGCACCGAGUCGGUGC | | ACUUGGCACCGAGUCGG*mU*mG*mC |
| G015681 | 51 | ACACAAAUACCAGUCCAGCGGUUUUAGAGCUAG | 151 | mA*mC*mA*CAAAUACCAGUCCAGCGGUUUUAGAGCU |
| | | AAAUAGCAAGUUAAAAUAAGGCGUCCGUUAUC | | AGAAAUAGCAAGUUAAAAUAAGGCGUCCGUUAUCAA |
| | | AACUUGGCACCGAGUCGGUGC | | CUUGGCACCGAGUCGG*mU*mG*mC |
| G015682 | 52 | ACACAAAUACCAGUCCAGCGGUUUUAGAGCUAG | 152 | mA*mC*mA*CAAAUACCAGUCCAGCGGUUUUAGAGCU |
| | | AAAUAGCAAGUUAAAAUAAGGUAUCCGUUAUC | | AGAAAUAGCAAGUUAAAAUAAGGUAUCCGUUAUCAA |
| | | AACUUGGCACCGAGUCGGUGC | | CUUGGCACCGAGUCGG*mU*mG*mC |
| G015683 | 53 | ACACAAAUACCAGUCCAGCGGUUUUAGAGCUAG | 153 | mA*mC*mA*CAAAUACCAGUCCAGCGGUUUUAGAGCU |
| | | AAAUAGCAAGUUAAAAUAAGGUUCCGUUAUCA | | AGAAAUAGCAAGUUAAAAUAAGGUUCCGUUAUCAAC |
| | | ACUUGGCACCGAGUCGGUGC | | UUGGCACCGAGUCGG*mU*mG*mC |
| G015684 | 54 | ACACAAAUACCAGUCCAGCGGUUUUAGAGCUAG | 154 | mA*mC*mA*CAAAUACCAGUCCAGCGGUUUUAGAGCU |
| | | AAAUAGCAAGUUAAAAUAAGGAUCCGUUAUCA | | AGAAAUAGCAAGUUAAAAUAAGGAUCCGUUAUCAAC |
| | | ACUUGGCACCGAGUCGGUGC | | UUGGCACCGAGUCGG*mU*mG*mC |
| G015685 | 55 | ACACAAAUACCAGUCCAGCGGUUUUCGAGCUAG | 155 | mA*mC*mA*CAAAUACCAGUCCAGCGGUUUUCGAGCU |
| | | AAAUAGCAAGUGAAAAUAAGGCUAGUCCGUUA | | AGAAAUAGCAAGUGAAAAUAAGGCUAGUCCGUUAUC |
| | | UCAACUUGGCACCGAGUCGGUGC | | AACUUGGCACCGAGUCGG*mU*mG*mC |
| G015686 | 56 | ACACAAAUACCAGUCCAGCGGUUUUUGAGCUAG | 156 | mA*mC*mA*CAAAUACCAGUCCAGCGGUUUUUGAGCU |
| | | AAAUAGCAAGUAAAAAUAAGGCUAGUCCGUUA | | AGAAAUAGCAAGUAAAAAUAAGGCUAGUCCGUUAUC |
| | | UCAACUUGGCACCGAGUCGGUGC | | AACUUGGCACCGAGUCGG*mU*mG*mC |
| G015687 | 57 | ACACAAAUACCAGUCCAGCGGUUUUAGAGCGAG | 157 | mA*mC*mA*CAAAUACCAGUCCAGCGGUUUUAGAGCG |
| | | AAAUCGCAAGUUAAAAUAAGGCUAGUCCGUUA | | AGAAAUCGCAAGUUAAAAUAAGGCUAGUCCGUUAUC |
| | | UCAACUUGGCACCGAGUCGGUGC | | AACUUGGCACCGAGUCGG*mU*mG*mC |
| G015688 | 58 | ACACAAAUACCAGUCCAGCGGUUUUAGAGCUAG | 158 | mA*mC*mA*CAAAUACCAGUCCAGCGGUUUUAGAGCU |
| | | AAAUAGCGAGUUAAAAUAAGGCUAGUCCGUUA | | AGAAAUAGCGAGUUAAAAUAAGGCUAGUCCGUUAUC |
| | | UCAACUUGGCACCGAGUCGGUGC | | AACUUGGCACCGAGUCGG*mU*mG*mC |
| G015689 | 59 | ACACAAAUACCAGUCCAGCGGUUUUAGAGCUAG | 159 | mA*mC*mA*CAAAUACCAGUCCAGCGGUUUUAGAGCU |
| | | AAAUAGCCGGUUAAAAUAAGGCUAGUCCGUUA | | AGAAAUAGCCGGUUAAAAUAAGGCUAGUCCGUUAUC |
| | | UCAACUUGGCACCGAGUCGGUGC | | AACUUGGCACCGAGUCGG*mU*mG*mC |
| G015690 | 60 | ACACAAAUACCAGUCCAGCGGUUUUAGAGCUAG | 160 | mA*mC*mA*CAAAUACCAGUCCAGCGGUUUUAGAGCU |
| | | AAAUAGCAAGUUAAAAUGAGGCUAGUCCGUUA | | AGAAAUAGCAAGUUAAAAUGAGGCUAGUCCGUUAUC |
| | | UCAACUUGGCACCGAGUCGGUGC | | AACUUGGCACCGAGUCGG*mU*mG*mC |
| G015691 | 61 | ACACAAAUACCAGUCCAGCGGUUUUAGAGCUAG | 161 | mA*mC*mA*CAAAUACCAGUCCAGCGGUUUUAGAGCU |
| | | AAAUAGCAAGUUAAAAUAAGGCUGGUCCGUUA | | AGAAAUAGCAAGUUAAAAUAAGGCUGGUCCGUUAUC |
| | | UCAACUUGGCACCGAGUCGGUGC | | AACUUGGCACCGAGUCGG*mU*mG*mC |
| G015692 | 62 | ACACAAAUACCAGUCCAGCGGUUUUAGAGCUAG | 162 | mA*mC*mA*CAAAUACCAGUCCAGCGGUUUUAGAGCU |
| | | AAAUAGCAAGUUAAAAUAAGGCUCGUCCGUUA | | AGAAAUAGCAAGUUAAAAUAAGGCUCGUCCGUUAUC |
| | | UCAACUUGGCACCGAGUCGGUGC | | AACUUGGCACCGAGUCGG*mU*mG*mC |
| G015693 | 63 | ACACAAAUACCAGUCCAGCGGUUUUAGAGCUAG | 163 | mA*mC*mA*CAAAUACCAGUCCAGCGGUUUUAGAGCU |
| | | AAAUAGCAAGUUAAAAUAAGGCUUGUCCGUUA | | AGAAAUAGCAAGUUAAAAUAAGGCUUGUCCGUUAUC |
| | | UCAACUUGGCACCGAGUCGGUGC | | AACUUGGCACCGAGUCGG*mU*mG*mC |
| G015694 | 64 | ACACAAAUACCAGUCCAGCGGUUUUAGAGCUAG | 164 | mA*mC*mA*CAAAUACCAGUCCAGCGGUUUUAGAGCU |
| | | AAAUAGCAAGUUAAAAUAAGGCUAGUCCGUUG | | AGAAAUAGCAAGUUAAAAUAAGGCUAGUCCGUUGUC |
| | | UCAACUUGGCACCGAGUCGGUGC | | AACUUGGCACCGAGUCGG*mU*mG*mC |
| G015695 | 65 | ACACAAAUACCAGUCCAGCGGUUUUAGAGCUAG | 165 | mA*mC*mA*CAAAUACCAGUCCAGCGGUUUUAGAGCU |
| | | AAAUAGCAAGUUAAAAUAAGGCUAGUCCGUUC | | AGAAAUAGCAAGUUAAAAUAAGGCUAGUCCGUUCUC |
| | | UCAACUUGGCACCGAGUCGGUGC | | AACUUGGCACCGAGUCGG*mU*mG*mC |
| G015696 | 66 | ACACAAAUACCAGUCCAGCGGUUUUAGAGCUAG | 166 | mA*mC*mA*CAAAUACCAGUCCAGCGGUUUUAGAGCU |
| | | AAAUAGCAAGUUAAAAUAAGGCUAGUCCGUUU | | AGAAAUAGCAAGUUAAAAUAAGGCUAGUCCGUUUUC |
| | | UCAACUUGGCACCGAGUCGGUGC | | AACUUGGCACCGAGUCGG*mU*mG*mC |
| G015697 | 67 | ACACAAAUACCAGUCCAGCGGUUUUAGAGCUAG | 167 | mA*mC*mA*CAAAUACCAGUCCAGCGGUUUUAGAGCU |
| | | AAAUAGCAAGUUAAAAUAAGGCUAGUCCGUUA | | AGAAAUAGCAAGUUAAAAUAAGGCUAGUCCGUUAUG |
| | | UGAACUUGGCACCGAGUCGGUGC | | AACUUGGCACCGAGUCGG*mU*mG*mC |
| G015698 | 68 | ACACAAAUACCAGUCCAGCGGUUUUAGAGCUAG | 168 | mA*mC*mA*CAAAUACCAGUCCAGCGGUUUUAGAGCU |
| | | AAAUAGCAAGUUAAAAUAAGGCUAGUCCGUUA | | AGAAAUAGCAAGUUAAAAUAAGGCUAGUCCGUUAUC |
| | | UCAACUUGGGACCGAGUCGGUCC | | AACUUGGGACCGAGUCGG*mU*mC*mC |
| G015699 | 69 | ACACAAAUACCAGUCCAGCGGUUUUAGAGCUAG | 169 | mA*mC*mA*CAAAUACCAGUCCAGCGGUUUUAGAGCU |
| | | AAAUAGCAAGUUAAAAUAAGGCUAGUCCGUUA | | AGAAAUAGCAAGUUAAAAUAAGGCUAGUCCGUUAUC |
| | | UCAACUUGGAACCGAGUCGGUUC | | AACUUGGAACCGAGUCGG*mU*mU*mC |
| G015700 | 70 | ACACAAAUACCAGUCCAGCGGUUUUCGAGCGAG | 170 | mA*mC*mA*CAAAUACCAGUCCAGCGGUUUUCGAGCG |
| | | AAAUCGCGAGUGAAAAUGAGGCUGGUCCGUUG | | AGAAAUCGCGAGUGAAAAUGAGGCUGGUCCGUUGUG |
| | | UGAACUUGGAACCGAGUCGGUUC | | AACUUGGAACCGAGUCGG*mU*mU*mC |
| G015701 | 71 | ACACAAAUACCAGUCCAGCGGUUUUUGAGCGAG | 171 | mA*mC*mA*CAAAUACCAGUCCAGCGGUUUUUGAGCG |
| | | AAAUCGCAAGUAAAAAUAAGGCUCGUCCGUUCU | | AGAAAUCGCAAGUAAAAAUAAGGCUCGUCCGUUCUG |
| | | GAACUUGGAACCGAGUCGGUUC | | AACUUGGAACCGAGUCGG*mU*mU*mC |
| G015702 | 72 | ACACAAAUACCAGUCCAGCGGUUUCGGAGCCGG | 172 | mA*mC*mA*CAAAUACCAGUCCAGCGGUUUCGGAGCC |
| | | AAACGGCGAGUCGAAAUGAGGCUGGUCCGUUG | | GGAAACGGCGAGUCGAAAUGAGGCUGGUCCGUUGUC |
| | | UCGGCUCGGAACCGAGUCGGUUC | | GGCUCGGAACCGAGUCGG*mU*mU*mC |
| G015703 | 73 | CUCACUGAAAAGUGAGUCUGGAGAGCUGCAGU | 173 | mC*mU*mC*ACUGAAAAGUGAGUCUGGAGAGCUGCAG |
| | | UUUAGAGCUAGAAAUAGCAAGUUAAAAUAAGG | | UUUUAGAGCUAGAAAUAGCAAGUUAAAAUAAGGCUA |
| | | CUAGUCCGUUAUCAACUUGGCACCGAGUCGGUG | | GUCCGUUAUCAACUUGGCACCGAGUCGG*mU*mG*mC |
| | | C | | |
| G015704 | 74 | CACUGAAAAGUGAGUCUGGAGAGCUGCAGUUU | 174 | mC*mA*mC*UGAAAAGUGAGUCUGGAGAGCUGCAGU |
| | | UAGAGCUAGAAAUAGCAAGUUAAAAUAAGGCU | | UUUAGAGCUAGAAAUAGCAAGUUAAAAUAAGGCUAG |
| | | AGUCCGUUAUCAACUUGGCACCGAGUCGGUGC | | UCCGUUAUCAACUUGGCACCGAGUCGG*mU*mG*mC |
| G015705 | 75 | CUGAAAAGUGAGUCUGGAGAGCUGCAGUUUUA | 175 | mC*mU*mG*AAAAGUGAGUCUGGAGAGCUGCAGUUU |
| | | GAGCUAGAAAUAGCAAGUUAAAAUAAGGCUAG | | UAGAGCUAGAAAUAGCAAGUUAAAAUAAGGCUAGUC |
| | | UCCGUUAUCAACUUGGCACCGAGUCGGUGC | | CGUUAUCAACUUGGCACCGAGUCGG*mU*mG*mC |
| G015706 | 76 | UCUGGAGAGCUGCAGUUUUAGAGCUAGAAAUA | 176 | mU*mC*mU*GGAGAGCUGCAGUUUUAGAGCUAGAAA |
| | | GCAAGUUAAAAUAAGGCUAGUCCGUUAUCAAC | | UAGCAAGUUAAAAUAAGGCUAGUCCGUUAUCAACUU |
| | | UUGGCACCGAGUCGGUGC | | GGCACCGAGUCGG*mU*mG*mC |
| G015707 | 77 | AGUCUGGAGAGCUGCAGUUUUAGAGCUAGAAA | 177 | mA*mG*mU*CUGGAGAGCUGCAGUUUUAGAGCUAGA |
| | | UAGCAAGUUAAAAUAAGGCUAGUCCGUUAUCA | | AAUAGCAAGUUAAAAUAAGGCUAGUCCGUUAUCAAC |
| | | ACUUGGCACCGAGUCGGUGC | | UUGGCACCGAGUCGG*mU*mG*mC |
| G015708 | 78 | UGAGUCUGGAGAGCUGCAGUUUUAGAGCUAGA | 178 | mU*mG*mA*GUCUGGAGAGCUGCAGUUUUAGAGCUA |
| | | AAUAGCAAGUUAAAAUAAGGCUAGUCCGUUAU | | GAAAUAGCAAGUUAAAAUAAGGCUAGUCCGUUAUCA |
| | | CAACUUGGCACCGAGUCGGUGC | | ACUUGGCACCGAGUCGG*mU*mG*mC |
| G015709 | 79 | GAAAAGUGAGUCUGGAGAGCUGCAGUUUUAGA | 179 | mG*mA*mA*AAGUGAGUCUGGAGAGCUGCAGUUUUA |
| | | GCUAGAAAUAGCAAGUUAAAAUAAGGCUAGUC | | GAGCUAGAAAUAGCAAGUUAAAAUAAGGCUAGUCCG |
| | | CGUUAUCAACUUGGCACCGAGUCGGUGC | | UUAUCAACUUGGCACCGAGUCGG*mU*mG*mC |
| G017275 | 80 | ACACAAAUACCAGUCCAGCGGUUUUAGAGCUAG | 180 | mA*mC*mA*CAAAUACCAGUCCAGCGGUUUUAGAGCU |
| | | AAAUAGCAAGUUAAAAUAAGGCUAGUCCGUUA | | AGAAAUAGCAAGUUAAAAUAAGGCUAGUCCGUUAUC |
| | | UCAACUUGGCACCGAGUCGGUGC | | AACUUGGCACCGAGUCGG*mU*mG*mC |
| G017276 | 81 | ACACAAAUACCAGUCCAGCGGUUUUAGAGCUAG | 181 | mA*mC*mA*CAAAUACCAGUCCAGCGGUUUUAGAmG |
| | | AAAUAGCAAGUUAAAAUAAGGCUAGUCCGUUA | | mCmUmAmGmAmAmAmUmAmGmCAAGUUAAAAUAAG |
| | | UCACGAAAGGGCACCGAGUCGGUGC | | GCUAGUCCGUUAUCACGAAAGGGCACCGAGUCGG*m |
| | | | | U*mG*mC |
| G017277 | 82 | ACACAAAUACCAGUCCAGCGGUUUUAGAGCUAG | 182 | mA*mC*mA*CAAAUACCAGUCCAGCGGUUUUAGAmG |
| | | AAAUAGCAAGUUAAAAUAAGGCUAGUCCGUUA | | mCmUmAmGmAmAmAmUmAmGmCAAGUUAAAAUAAG |
| | | UCAAAAAUGGCACCGAGUCGGUGC | | GCUAGUCCGUUAUCAAAAAUGGCACCGAGUCGG*mU* |
| | | | | mG*mC |
| G017278 | 83 | ACACAAAUACCAGUCCAGCGGUUUUAGAGCUAG | 183 | mA*mC*mA*CAAAUACCAGUCCAGCGGUUUUAGAmG |
| | | AAAUAGCAAGUUAAAAUAAGGCUAGUCCGUUA | | mCmUmAmGmAmAmAmUmAmGmCAAGUUAAAAUAAG |
| | | UCACAAGGGCACCGAGUCGGUGC | | GCUAGUCCGUUAUCACAAGGGCACCGAGUCGG*mU*m |
| | | | | G*mC |
| G017279 | 84 | ACACAAAUACCAGUCCAGCGGUUUUAGAGCUAG | 184 | mA*mC*mA*CAAAUACCAGUCCAGCGGUUUUAGAmG |
| | | AAAUAGCAAGUUAAAAUAAGGCUAGUCCGUUA | | mCmUmAmGmAmAmAmUmAmGmCAAGUUAAAAUAAG |
| | | UCAAAAUGGCACCGAGUCGGUGC | | GCUAGUCCGUUAUCAAAAUGGCACCGAGUCGG*mU* |
| | | | | mG*mC |
| G017280 | 85 | ACACAAAUACCAGUCCAGCGGUUUUAGAGCGCG | 185 | mA*mC*mA*CAAAUACCAGUCCAGCGGUUUUAGAGCG |
| | | AAGCGCAAGUUAAAAUAAGGCUAGUCCGUUAU | | CGAAGCGCAAGUUAAAAUAAGGCUAGUCCGUUAUCA |
| | | CAAAAUGGCACCGAGUCGGUGC | | AAAUGGCACCGAGUCGG*mU*mG*mC |
| G017281 | 86 | ACACAAAUACCAGUCCAGCGGUUUUAGAGCUGA | 186 | mA*mC*mA*CAAAUACCAGUCCAGCGGUUUUAGAGCU |
| | | AAAGCAAGUUAAAAUAAGGCUAGUCCGUUAUC | | GAAAAGCAAGUUAAAAUAAGGCUAGUCCGUUAUCAA |
| | | AAAAUGGCACCGAGUCGGUGC | | AAUGGCACCGAGUCGG*mU*mG*mC |
| G017282 | 87 | ACACAAAUACCAGUCCAGCGGUUUUAGAGCGAA | 187 | mA*mC*mA*CAAAUACCAGUCCAGCGGUUUUAGAGCG |
| | | AGCAAGUUAAAAUAAGGCUAGUCCGUUAUCAA | | AAAGCAAGUUAAAAUAAGGCUAGUCCGUUAUCAAAA |
| | | AAUGGCACCGAGUCGGUGC | | UGGCACCGAGUCGG*mU*mG*mC |
| G017283 | 88 | ACACAAAUACCAGUCCAGCGGUUUUAGAGCAAA | 188 | mA*mC*mA*CAAAUACCAGUCCAGCGGUUUUAGAGCA |
| | | GCAAGUUAAAAUAAGGCUAGUCCGUUAUCAAA | | AAGCAAGUUAAAAUAAGGCUAGUCCGUUAUCAAAAU |
| | | AUGGCACCGAGUCGGUGC | | GGCACCGAGUCGG*mU*mG*mC |
| G013773 | 89 | ACACAAAUACCAGUCCAGCGGUUUUAGAGCGAA | 189 | mA*mC*mA*CAAAUACCAGUCCAGCGGUUUUAGAmG |
| | | AGCAAGUUAAAAUAAGGCUAGUCCGUUAUCAA | | mCmGmAmAmAmGmCAAGUUAAAAUAAGGCUAGUCC |
| | | CUUGGCACCGAGUCGGUGC | | GUUAUCAACUUGGCACCGAGUCGG*mU*mG*mC |
| G013776 | 90 | ACACAAAUACCAGUCCAGCGGUUUUAGAGCGAA | 190 | mA*mC*mA*CAAAUACCAGUCCAGCGGUUUUAGAmG |
| | | AGCAAGUUAAAAUAAGGCUAGUCCGUUAUCAA | | mCmGmAmAmAmGmCAAGUUAAAAUAAGGCUAGUCC |
| | | GAAAUGGCACCGAGUCGGUGC | | GUUAUCAAGAAAUGGCACCGAGUCGG*mU*mG*mC |
| G000502 | 91 | ACACAAAUACCAGUCCAGCGGUUUUAGAGCUAG | 191 | mA*mC*mA*CAAAUACCAGUCCAGCGGUUUUAGAmG |
| | | AAAUAGCAAGUUAAAAUAAGGCUAGUCCGUUA | | mCmUmAmGmAmAmAmUmAmGmCAAGUUAAAAUAAG |
| | | UCAACUUGAAAAAGUGGCACCGAGUCGGUGCUU | | GCUAGUCCGUUAUCAmAmCmUmUmGmAmAmAmAmA |
| | | UU | | mGmUmGmGmCmAmCmCmGmAmGmUmCmGmGmUmG |
| | | | | mCmU*mU*mU*mU |
| G009978 | 92 | ACACAAAUACCAGUCCAGCGGUUUUAGAGCUAG | 192 | mA*mC*mA*CAAAUACCAGUCCAGCGGUUUUAGAGCU |
| | | AAAUAGCAAGUUAAAAUAAGGCUAGUCCGUUA | | AGAAAUAGCAAGUUAAAAUAAGGCUAGUCCGUUAUC |
| | | UCAACUUGAAAAAGUGGCACCGAGUCGGUGCUU | | AACUUGAAAAAGUGGCACCGAGUCGGUGCU*mU*mU* |
| | | UU | | mU |
| G010039 | 93 | ACACAAAUACCAGUCCAGCGGUUUUAGAGCUAG | 193 | mA*mC*mA*mCAA*A*fU*fA*fC*fCAfGfUCC*fA |
| | | AAAUAGCAAGUUAAAAUAAGGCUAGUCCGUUA | | fGCGmGUUUfUAGmAmGmCmUmAmGmAmAmAmUmAmGm |
| | | UCAACUUGAAAAAGUGGCACCGAGUCGGUGCUU | | CmAmAGUfUmAfAmAfAmUAmAmGmGmCmUmAGUmCmC |
| | | UU | | GUfUAmUmCAmAmCmUmUmGmAmAmAmAmAmGmUmG |
| | | | | mGmCmAmCmCmGmAmGmUmCmGmGmUmGmCmU*mU |
| | | | | *mU*mU |
| G012401 | 94 | ACACAAAUACCAGUCCAGCGGUUUUAGAGCUAG | 194 | mA*mC*mA*CAAAUACCAGUCCAGCGGUUUUAGAmG |
| | | AAAUAGCAAGUUAAAAUAAGGCUAGUCCGUUA | | mCmUmAmGmAmAmAmUmAmGmCAAGUUAAAAUAAG |
| | | UCAACUUGGCACCGAGUCGGUGC | | GCUAGUCCGUUAUCAACUUGGCACCGAGUCGG*mU*m |
| | | | | G*mC |
| G012402 | 95 | ACACAAAUACCAGUCCAGCGGUUUUAGAGCUAG | 195 | mA*mC*mA*CAA*A*fU*fA*fC*fCAfGfUCCfAfG |
| | | AAAUAGCAAGUUAAAAUAAGGCUAGUCCGUUA | | CGGUUUUAGAmGmCmUmAmGmAmAmAmUmAmGmCAAG |
| | | UCAACUUGGCACCGAGUCGGUGC | | UUAAAAUAAGGCUAGUCCGUUAUCAACUUGGCACCGA |
| | | | | GUCGG*mU*mG*mC |
| G013772 | 96 | ACACAAAUACCAGUCCAGCGGUUUUAGAGCUAG | 196 | mA*mC*mA*CAAAUACCAGUCCAGCGGUUUUAGAmG |
| | | AAAUAGCAAGUUAAAAUAAGGCUAGUCCGUUA | | mCmUmAmGmAmAmAmUmAmGmCAAGUUAAAAUAAG |
| | | UCAAGCACCGAGUCGGUGC | | GCUAGUCCGUUAUCAAGCACCGAGUCGG*mU*mG*mC |
| G013774 | 97 | ACACAAAUACCAGUCCAGCGGUUUUAGAGCGAA | 197 | mA*mC*mA*CAAAUACCAGUCCAGCGGUUUUAGAmG |
| | | AGCAAGUUAAAAUAAGGCUAGUCCGUUAUCAA | | mCmGmAmAmAmGmCAAGUUAAAAUAAGGCUAGUCC |
| | | GCACCGAGUCGGUGC | | GUUAUCAAGCACCGAGUCGG*mU*mG*mC |
| G013775 | 98 | ACACAAAUACCAGUCCAGCGGUUUUCGAGCGAG | 198 | mA*mC*mA*CAAAUACCAGUCCAGCGGUUUUCGAmGm |
| | | AAAUCGCGAGUGAAAAUGAGGCUGGUCCGUGA | | CmGmAmGmAmAmAmUmCmGmCGAGUGAAAAUGAGG |
| | | UGAACUUGAAAAAGUGGGACCGAGUCGGUCCU | | CUGGUCCGUGAUGAmAmCmUmUmGmAmAmAmAmAm |
| | | UUU | | GmUmGmGmGmAmCmCmGmAmGmUmCmGmGmUmCm |
| | | | | CmU*mU*mU*mU |
| | 99- | Not Used | 199- | Not Used |
| | 100 | | 200 | |
| C- | 201 | GUUUUAGAGCUAGAAAUAGCAAGUUAAAAUAA | 301 | GUUUUAGAGCUAGAAAUAGCAAGUUAAAAUAAGGCU |
| G015631 | | GGCUAGUCCGUUAUCAACUAAGCACCGAGUCGG | | AGUCCGUUAUCAACUAAGCACCGAGUCGG*mU*mG*m |
| | | UGC | | C |
| C- | 202 | GUUUUAGAGCUAGAAAUAGCAAGUUAAAAUAA | 302 | GUUUUAGAGCUAGAAAUAGCAAGUUAAAAUAAGGCU |
| G015632 | | GGCUAGUCCGUUAUCAACUCAGCACCGAGUCGG | | AGUCCGUUAUCAACUCAGCACCGAGUCGG*mU*mG*m |
| | | UGC | | C |
| C- | 203 | GUUUUAGAGCUAGAAAUAGCAAGUUAAAAUAA | 303 | GUUUUAGAGCUAGAAAUAGCAAGUUAAAAUAAGGCU |
| G015633 | | GGCUAGUCCGUUAUCCACUUGGCACCGAGUCGG | | AGUCCGUUAUCCACUUGGCACCGAGUCGG*mU*mG*m |
| | | UGC | | C |
| C- | 204 | GUUUUAGAGCUAGAAAUAGCAAGUUAAAAUAC | 304 | GUUUUAGAGCUAGAAAUAGCAAGUUAAAAUACGGCU |
| G015634 | | GGCUAGUCCGUUAUCAACUUGGCACCGAGUCGG | | AGUCCGUUAUCAACUUGGCACCGAGUCGG*mU*mG*m |
| | | UGC | | C |
| C- | 205 | GUUUUAGAGCUAGAAAUAGCAAGUUAAAAUAA | 305 | GUUUUAGAGCUAGAAAUAGCAAGUUAAAAUAAGGCU |
| G015635 | | GGCUAGUCCGUUAUCAAGAGCUGGCACCGAGUC | | AGUCCGUUAUCAAGAGCUGGCACCGAGUCGG*mU*m |
| | | GGUGC | | G*mC |
| C- | 206 | GUUUUAGAGCUAGAAAUAGCAAGUUAAAAUAA | 306 | GUUUUAGAGCUAGAAAUAGCAAGUUAAAAUAAGGCU |
| G015636 | | GGCUAGUCCGUUAUCAAGAAAUGGCACCGAGUC | | AGUCCGUUAUCAAGAAAUGGCACCGAGUCGG*mU*m |
| | | GGUGC | | G*mC |
| C- | 207 | GUUUUAGAGCUAGAAAUAGCAAGUUAAAAUAA | 307 | GUUUUAGAGCUAGAAAUAGCAAGUUAAAAUAAGGCU |
| G015637 | | GGCUAGUCCGUUAUCACGAAAGGGCACCGAGUC | | AGUCCGUUAUCACGAAAGGGCACCGAGUCGG*mU*m |
| | | GGUGC | | G*mC |
| C- | 208 | GUUUUAGAGCUAGAAAUAGCAAGUUAAAAUAA | 308 | GUUUUAGAGCUAGAAAUAGCAAGUUAAAAUAAGGCU |
| G015638 | | GGCUAGUCCGUUAUCAAAAAUGGCACCGAGUCG | | AGUCCGUUAUCAAAAAUGGCACCGAGUCGG*mU*mG* |
| | | GUGC | | mC |
| C- | 209 | GUUUUAGAGCUAGAAAUAGCAAGUUAAAAUAA | 309 | GUUUUAGAGCUAGAAAUAGCAAGUUAAAAUAAGGCU |
| G015639 | | GGCUAGUCCGUUAUCAAAAGUGGCACCGAGUCG | | AGUCCGUUAUCAAAAGUGGCACCGAGUCGG*mU*mG* |
| | | GUGC | | mC |
| C- | 210 | GUUUUAGAGCUAGAAAUAGCAAGUUAAAAUAA | 310 | GUUUUAGAGCUAGAAAUAGCAAGUUAAAAUAAGGCU |
| G015640 | | GGCUAGUCCGUUAUCAACAGUGGCACCGAGUCG | | AGUCCGUUAUCAACAGUGGCACCGAGUCGG*mU*mG* |
| | | GUGC | | mC |
| C- | 211 | GUUUUAGAGCUAGAAAUAGCAAGUUAAAAUAA | 311 | GUUUUAGAGCUAGAAAUAGCAAGUUAAAAUAAGGCU |
| G015641 | | GGCUAGUCCGUUAUCACAAGGGCACCGAGUCGG | | AGUCCGUUAUCACAAGGGCACCGAGUCGG*mU*mG*m |
| | | UGC | | C |
| C- | 212 | GUUUUAGAGCUAGAAAUAGCAAGUUAAAAUAA | 312 | GUUUUAGAGCUAGAAAUAGCAAGUUAAAAUAAGGCU |
| G015642 | | GGCUAGUCCGUUAUCAAAAUGGCACCGAGUCGG | | AGUCCGUUAUCAAAAUGGCACCGAGUCGG*mU*mG*m |
| | | UGC | | C |
| C- | 213 | GUUUUAGAGCUAGAAAUAGCAAGUUAAAAUAA | 313 | GUUUUAGAGCUAGAAAUAGCAAGUUAAAAUAAGGCU |
| G015643 | | GGCUAGUCCGUUAUCAAAGGCACCGAGUCGGUG | | AGUCCGUUAUCAAAGGCACCGAGUCGG*mU*mG*mC |
| | | C | | |
| C- | 214 | GUUUUAGAGCUAGAAAUAGCAAGUUAAAAUAA | 314 | GUUUUAGAGCUAGAAAUAGCAAGUUAAAAUAAGGCU |
| G015644 | | GGCUAGUCCGUUAUCAAGGGCACCGAGUCGGUG | | AGUCCGUUAUCAAGGGCACCGAGUCGG*mU*mG*mC |
| | | C | | |
| C- | 215 | GUUUUAGAGCUAGAAAUAGCAAGUUAAAAUAA | 315 | GUUUUAGAGCUAGAAAUAGCAAGUUAAAAUAAGGCU |
| G015645 | | GGCUAGUCCGUUAUCAGGCACCGAGUCGGUGC | | AGUCCGUUAUCAGGCACCGAGUCGG*mU*mG*mC |
| C- | 216 | GUUUUAGAGCUAGAAUAGCAAGUUAAAAUAAG | 316 | GUUUUAGAGCUAGAAUAGCAAGUUAAAAUAAGGCUA |
| G015646 | | GCUAGUCCGUUAUCAACUUGGCACCGAGUCGGU | | GUCCGUUAUCAACUUGGCACCGAGUCGG*mU*mG*mC |
| | | GC | | |
| C- | 217 | GUUUUAGAGCGCAAAGCGCAAGUUAAAAUAAG | 317 | GUUUUAGAGCGCAAAGCGCAAGUUAAAAUAAGGCUA |
| G015647 | | GCUAGUCCGUUAUCAACUUGGCACCGAGUCGGU | | GUCCGUUAUCAACUUGGCACCGAGUCGG*mU*mG*mC |
| | | GC | | |
| C- | 218 | GUUUUAGAGCGCGAAGCGCAAGUUAAAAUAAG | 318 | GUUUUAGAGCGCGAAGCGCAAGUUAAAAUAAGGCUA |
| G015648 | | GCUAGUCCGUUAUCAACUUGGCACCGAGUCGGU | | GUCCGUUAUCAACUUGGCACCGAGUCGG*mU*mG*mC |
| | | GC | | |
| C- | 219 | GUUUUAGAGCGGAAACGCAAGUUAAAAUAAGG | 319 | GUUUUAGAGCGGAAACGCAAGUUAAAAUAAGGCUAG |
| G015649 | | CUAGUCCGUUAUCAACUUGGCACCGAGUCGGUG | | UCCGUUAUCAACUUGGCACCGAGUCGGU*mG*mC*mU |
| | | CU | | |
| C- | 220 | GUUUUAGAGCGGAAACGCAAGUUAAAAUAAGG | 320 | GUUUUAGAGCGGAAACGCAAGUUAAAAUAAGGCUAG |
| G015650 | | CUAGUCCGUUAUCAACUUGGCACCGAGUCGGUG | | UCCGUUAUCAACUUGGCACCGAGUCGG*mU*mG*mC |
| | | C | | |
| C- | 221 | GUUUUAGAGCCGAAAGGCAAGUUAAAAUAAGG | 321 | GUUUUAGAGCCGAAAGGCAAGUUAAAAUAAGGCUAG |
| G015651 | | CUAGUCCGUUAUCAACUUGGCACCGAGUCGGUG | | UCCGUUAUCAACUUGGCACCGAGUCGG*mU*mG*mC |
| | | C | | |
| C- | 222 | GUUUUAGAGCUGAAAAGCAAGUUAAAAUAAGG | 322 | GUUUUAGAGCUGAAAAGCAAGUUAAAAUAAGGCUAG |
| G015652 | | CUAGUCCGUUAUCAACUUGGCACCGAGUCGGUG | | UCCGUUAUCAACUUGGCACCGAGUCGG*mU*mG*mC |
| | | C | | |
| C- | 223 | GUUUUAGAGCGAAAGCAAGUUAAAAUAAGGCU | 323 | GUUUUAGAGCGAAAGCAAGUUAAAAUAAGGCUAGUC |
| G015653 | | AGUCCGUUAUCAACUUGGCACCGAGUCGGUGC | | CGUUAUCAACUUGGCACCGAGUCGG*mU*mG*mC |
| C- | 224 | GUUUUAGAGCGAAGCAAGUUAAAAUAAGGCUA | 324 | GUUUUAGAGCGAAGCAAGUUAAAAUAAGGCUAGUCC |
| G015654 | | GUCCGUUAUCAACUUGGCACCGAGUCGGUGC | | GUUAUCAACUUGGCACCGAGUCGG*mU*mG*mC |
| C- | 225 | GUUUUAGAGCAAAGCAAGUUAAAAUAAGGCUA | 325 | GUUUUAGAGCAAAGCAAGUUAAAAUAAGGCUAGUCC |
| G015655 | | GUCCGUUAUCAACUUGGCACCGAGUCGGUGC | | GUUAUCAACUUGGCACCGAGUCGG*mU*mG*mC |
| C- | 226 | GUUUUAGAGGAAACAAGUUAAAAUAAGGCUAG | 326 | GUUUUAGAGGAAACAAGUUAAAAUAAGGCUAGUCCG |
| G015656 | | UCCGUUAUCAACUUGGCACCGAGUCGGUGC | | UUAUCAACUUGGCACCGAGUCGG*mU*mG*mC |
| C- | 227 | GUUUUAGAGCAAGCAAGUUAAAAUAAGGCUAG | 327 | GUUUUAGAGCAAGCAAGUUAAAAUAAGGCUAGUCCG |
| G015657 | | UCCGUUAUCAACUUGGCACCGAGUCGGUGC | | UUAUCAACUUGGCACCGAGUCGG*mU*mG*mC |
| C- | 228 | GUUUUAGAGCGAGCAAGUUAAAAUAAGGCUAG | 328 | GUUUUAGAGCGAGCAAGUUAAAAUAAGGCUAGUCCG |
| G015658 | | UCCGUUAUCAACUUGGCACCGAGUCGGUGC | | UUAUCAACUUGGCACCGAGUCGG*mU*mG*mC |
| C- | 229 | GUUUUAGAGCGCAAGUUAAAAUAAGGCUAGUC | 329 | GUUUUAGAGCGCAAGUUAAAAUAAGGCUAGUCCGUU |
| G015659 | | CGUUAUCAACUUGGCACCGAGUCGGUGC | | AUCAACUUGGCACCGAGUCGG*mU*mG*mC |
| C- | 230 | GUUUUAGAGAACAAGUUAAAAUAAGGCUAGUC | 330 | GUUUUAGAGAACAAGUUAAAAUAAGGCUAGUCCGUU |
| G015660 | | CGUUAUCAACUUGGCACCGAGUCGGUGC | | AUCAACUUGGCACCGAGUCGG*mU*mG*mC |
| C- | 231 | GUUUUAGAGACAAGUUAAAAUAAGGCUAGUCC | 331 | GUUUUAGAGACAAGUUAAAAUAAGGCUAGUCCGUUA |
| G015661 | | GUUAUCAACUUGGCACCGAGUCGGUGC | | UCAACUUGGCACCGAGUCGG*mU*mG*mC |
| C- | 232 | GUUUUAGAGCAAGUUAAAAUAAGGCUAGUCCG | 332 | GUUUUAGAGCAAGUUAAAAUAAGGCUAGUCCGUUAU |
| G015662 | | UUAUCAACUUGGCACCGAGUCGGUGC | | CAACUUGGCACCGAGUCGG*mU*mG*mC |
| C- | 233 | GUUUUAGAAAAAGUUAAAAUAAGGCUAGUCCG | 333 | GUUUUAGAAAAAGUUAAAAUAAGGCUAGUCCGUUAU |
| G015663 | | UUAUCAACUUGGCACCGAGUCGGUGC | | CAACUUGGCACCGAGUCGG*mU*mG*mC |
| C- | 234 | GUUUUAGAAAAGUUAAAAUAAGGCUAGUCCGU | 334 | GUUUUAGAAAAGUUAAAAUAAGGCUAGUCCGUUAUC |
| G015664 | | UAUCAACUUGGCACCGAGUCGGUGC | | AACUUGGCACCGAGUCGG*mU*mG*mC |
| C- | 235 | GUUUUAGAGCUAGAAAUAGCAAGUUAAAAUAA | 335 | GUUUUAGAGCUAGAAAUAGCAAGUUAAAAUAAGGCU |
| G015665 | | GGCUAGUCCGUUAUCAACUUGGCACCGAGUCGG | | AGUCCGUUAUCAACUUGGCACCGAGUCG*mG*mU*mG |
| | | UG | | |
| C- | 236 | GUUUUAGAGCUAGAAAUAGCAAGUUAAAAUAA | 336 | GUUUUAGAGCUAGAAAUAGCAAGUUAAAAUAAGGCU |
| G015666 | | GGCUAGUCCGUUAUCAACUUGGCACCGAGUCGG | | AGUCCGUUAUCAACUUGGCACCGAGUC*mG*mG*mU |
| | | U | | |
| C- | 237 | GUUUUAGAGCUAGAAAUAGCAAGUUAAAAUAA | 337 | GUUUUAGAGCUAGAAAUAGCAAGUUAAAAUAAGGCU |
| G015667 | | GGCUAGUCCGUUAUCAACUUGGCACCGAGUCGG | | AGUCCGUUAUCAACUUGGCACCGAGU*mC*mG*mG |
| C- | 238 | GUUUUAGAGCUAGAAAUAGCAAGUUAAAAUAA | 338 | GUUUUAGAGCUAGAAAUAGCAAGUUAAAAUAAGGCU |
| G015668 | | GGCUAGUCCGUUAUCAACUUGGCACCGAGUCG | | AGUCCGUUAUCAACUUGGCACCGAG*mU*mC*mG |
| C- | 239 | GUUUUAGAGCUAGAAAUAGCAAGUUAAAAUAA | 339 | GUUUUAGAGCUAGAAAUAGCAAGUUAAAAUAAGGCU |
| G015669 | | GGCUAGUCCGUUAUCAACUUGGCACCGAGUC | | AGUCCGUUAUCAACUUGGCACCGA*mG*mU*mC |
| C- | 240 | GUUUUAGAGCUAGAAAUAGCAAGUUAAAAUAA | 340 | GUUUUAGAGCUAGAAAUAGCAAGUUAAAAUAAGGCU |
| G015670 | | GGCUAGUCCGUUAUCAACUUGGCACCGAGU | | AGUCCGUUAUCAACUUGGCACCG*mA*mG*mU |
| C- | 241 | GUUUUAGAGCGAAAGCAAGUUAAAAUAAGGCU | 341 | GUUUUAGAGCGAAAGCAAGUUAAAAUAAGGCUAGUC |
| G015671 | | AGUCCGUUAUCACUGGCACCGAGUCGGUGC | | CGUUAUCACUGGCACCGAGUCGG*mU*mG*mC |
| C- | 242 | GUUUUAGAGCGAAAGCAAGUUAAAAUAAGGCU | 342 | GUUUUAGAGCGAAAGCAAGUUAAAAUAAGGCUAGUC |
| G015672 | | AGUCCGUUAUCAGGCACCGAGUCGGUGC | | CGUUAUCAGGCACCGAGUCGG*mU*mG*mC |
| C- | 243 | GUUUUAGAGAAAAAGUUAAAAUAAGGCUAGUC | 343 | GUUUUAGAGAAAAAGUUAAAAUAAGGCUAGUCCGUU |
| G015673 | | CGUUAUCAACUUGGCACCGAGUCGGUGC | | AUCAACUUGGCACCGAGUCGG*mU*mG*mC |
| C- | 244 | GUUUUAGAGGAAACAAGUUAAAAUAAGGCUAG | 344 | GUUUUAGAGGAAACAAGUUAAAAUAAGGCUAGUCCG |
| G015674 | | UCCGUUAUCAAUGGCACCGAGUCGGUGC | | UUAUCAAUGGCACCGAGUCGG*mU*mG*mC |
| C- | 245 | GUUUUAGAGAAAAAGUUAAAAUAAGGCUAGUC | 345 | GUUUUAGAGAAAAAGUUAAAAUAAGGCUAGUCCGUU |
| G015675 | | CGUUAUCAAUGGCACCGAGUCGGUGC | | AUCAAUGGCACCGAGUCGG*mU*mG*mC |
| C- | 246 | GUUUUAGAGGAAACAAGUUAAAAUAAGGCUAG | 346 | GUUUUAGAGGAAACAAGUUAAAAUAAGGCUAGUCCG |
| G015676 | | UCCGUUAUCACUGGCACCGAGUCGGUGC | | UUAUCACUGGCACCGAGUCGG*mU*mG*mC |
| C- | 247 | GUUUUAGAGAAAAAGUUAAAAUAAGGCUAGUC | 347 | GUUUUAGAGAAAAAGUUAAAAUAAGGCUAGUCCGUU |
| G015677 | | CGUUAUCAGGCACCGAGUCGGUGC | | AUCAGGCACCGAGUCGG*mU*mG*mC |
| C- | 248 | GUUUUAGAGCGAAAGCAAGUUAAAAUAAGGCU | 348 | GUUUUAGAGCGAAAGCAAGUUAAAAUAAGGCUAGUC |
| G015678 | | AGUCCGUUAUCAAGCUAUGGCACCGAGUCGGUG | | CGUUAUCAAGCUAUGGCACCGAGUCGG*mU*mG*mC |
| | | C | | |
| C- | 249 | GUUUUAGAGCUAGAAAUAGCAAGUUAAAAUAA | 349 | GUUUUAGAGCUAGAAAUAGCAAGUUAAAAUAAGGCA |
| G015679 | | GGCAGUCCGUUAUCAACUUGGCACCGAGUCGGU | | GUCCGUUAUCAACUUGGCACCGAGUCGG*mU*mG*mC |
| | | GC | | |
| C- | 250 | GUUUUAGAGCUAGAAAUAGCAAGUUAAAAUAA | 350 | GUUUUAGAGCUAGAAAUAGCAAGUUAAAAUAAGGCU |
| G015680 | | GGCUGUCCGUUAUCAACUUGGCACCGAGUCGGU | | GUCCGUUAUCAACUUGGCACCGAGUCGG*mU*mG*mC |
| | | GC | | |
| C- | 251 | GUUUUAGAGCUAGAAAUAGCAAGUUAAAAUAA | 351 | GUUUUAGAGCUAGAAAUAGCAAGUUAAAAUAAGGCG |
| G015681 | | GGCGUCCGUUAUCAACUUGGCACCGAGUCGGUG | | UCCGUUAUCAACUUGGCACCGAGUCGG*mU*mG*mC |
| | | C | | |
| C- | 252 | GUUUUAGAGCUAGAAAUAGCAAGUUAAAAUAA | 352 | GUUUUAGAGCUAGAAAUAGCAAGUUAAAAUAAGGUA |
| G015682 | | GGUAUCCGUUAUCAACUUGGCACCGAGUCGGUG | | UCCGUUAUCAACUUGGCACCGAGUCGG*mU*mG*mC |
| | | C | | |
| C- | 253 | GUUUUAGAGCUAGAAAUAGCAAGUUAAAAUAA | 353 | GUUUUAGAGCUAGAAAUAGCAAGUUAAAAUAAGGUU |
| G015683 | | GGUUCCGUUAUCAACUUGGCACCGAGUCGGUGC | | CCGUUAUCAACUUGGCACCGAGUCGG*mU*mG*mC |
| C- | 254 | GUUUUAGAGCUAGAAAUAGCAAGUUAAAAUAA | 354 | GUUUUAGAGCUAGAAAUAGCAAGUUAAAAUAAGGAU |
| G015684 | | GGAUCCGUUAUCAACUUGGCACCGAGUCGGUGC | | CCGUUAUCAACUUGGCACCGAGUCGG*mU*mG*mC |
| C- | 255 | GUUUUCGAGCUAGAAAUAGCAAGUGAAAAUAA | 355 | GUUUUCGAGCUAGAAAUAGCAAGUGAAAAUAAGGCU |
| G015685 | | GGCUAGUCCGUUAUCAACUUGGCACCGAGUCGG | | AGUCCGUUAUCAACUUGGCACCGAGUCGG*mU*mG*m |
| | | UGC | | C |
| C- | 256 | GUUUUUGAGCUAGAAAUAGCAAGUAAAAAUAA | 356 | GUUUUUGAGCUAGAAAUAGCAAGUAAAAAUAAGGCU |
| G015686 | | GGCUAGUCCGUUAUCAACUUGGCACCGAGUCGG | | AGUCCGUUAUCAACUUGGCACCGAGUCGG*mU*mG*m |
| | | UGC | | C |
| C- | 257 | GUUUUAGAGCGAGAAAUCGCAAGUUAAAAUAA | 357 | GUUUUAGAGCGAGAAAUCGCAAGUUAAAAUAAGGCU |
| G015687 | | GGCUAGUCCGUUAUCAACUUGGCACCGAGUCGG | | AGUCCGUUAUCAACUUGGCACCGAGUCGG*mU*mG*m |
| | | UGC | | C |
| C- | 258 | GUUUUAGAGCUAGAAAUAGCGAGUUAAAAUAA | 358 | GUUUUAGAGCUAGAAAUAGCGAGUUAAAAUAAGGCU |
| G015688 | | GGCUAGUCCGUUAUCAACUUGGCACCGAGUCGG | | AGUCCGUUAUCAACUUGGCACCGAGUCGG*mU*mG*m |
| | | UGC | | C |
| C- | 259 | GUUUUAGAGCUAGAAAUAGCCGGUUAAAAUAA | 359 | GUUUUAGAGCUAGAAAUAGCCGGUUAAAAUAAGGCU |
| G015689 | | GGCUAGUCCGUUAUCAACUUGGCACCGAGUCGG | | AGUCCGUUAUCAACUUGGCACCGAGUCGG*mU*mG*m |
| | | UGC | | C |
| C- | 260 | GUUUUAGAGCUAGAAAUAGCAAGUUAAAAUGA | 360 | GUUUUAGAGCUAGAAAUAGCAAGUUAAAAUGAGGCU |
| G015690 | | GGCUAGUCCGUUAUCAACUUGGCACCGAGUCGG | | AGUCCGUUAUCAACUUGGCACCGAGUCGG*mU*mG*m |
| | | UGC | | C |
| C- | 261 | GUUUUAGAGCUAGAAAUAGCAAGUUAAAAUAA | 361 | GUUUUAGAGCUAGAAAUAGCAAGUUAAAAUAAGGCU |
| G015691 | | GGCUGGUCCGUUAUCAACUUGGCACCGAGUCGG | | GGUCCGUUAUCAACUUGGCACCGAGUCGG*mU*mG*m |
| | | UGC | | C |
| C- | 262 | GUUUUAGAGCUAGAAAUAGCAAGUUAAAAUAA | 362 | GUUUUAGAGCUAGAAAUAGCAAGUUAAAAUAAGGCU |
| G015692 | | GGCUCGUCCGUUAUCAACUUGGCACCGAGUCGG | | CGUCCGUUAUCAACUUGGCACCGAGUCGG*mU*mG*m |
| | | UGC | | C |
| C- | 263 | GUUUUAGAGCUAGAAAUAGCAAGUUAAAAUAA | 363 | GUUUUAGAGCUAGAAAUAGCAAGUUAAAAUAAGGCU |
| G015693 | | GGCUUGUCCGUUAUCAACUUGGCACCGAGUCGG | | UGUCCGUUAUCAACUUGGCACCGAGUCGG*mU*mG*m |
| | | UGC | | c |
| C- | 264 | GUUUUAGAGCUAGAAAUAGCAAGUUAAAAUAA | 364 | GUUUUAGAGCUAGAAAUAGCAAGUUAAAAUAAGGCU |
| G015694 | | GGCUAGUCCGUUGUCAACUUGGCACCGAGUCGG | | AGUCCGUUGUCAACUUGGCACCGAGUCGG*mU*mG*m |
| | | UGC | | c |
| C- | 265 | GUUUUAGAGCUAGAAAUAGCAAGUUAAAAUAA | 365 | GUUUUAGAGCUAGAAAUAGCAAGUUAAAAUAAGGCU |
| G015695 | | GGCUAGUCCGUUCUCAACUUGGCACCGAGUCGG | | AGUCCGUUCUCAACUUGGCACCGAGUCGG*mU*mG*m |
| | | UGC | | c |
| C- | 266 | GUUUUAGAGCUAGAAAUAGCAAGUUAAAAUAA | 366 | GUUUUAGAGCUAGAAAUAGCAAGUUAAAAUAAGGCU |
| G015696 | | GGCUAGUCCGUUUUCAACUUGGCACCGAGUCGG | | AGUCCGUUUUCAACUUGGCACCGAGUCGG*mU*mG*m |
| | | UGC | | C |
| C- | 267 | GUUUUAGAGCUAGAAAUAGCAAGUUAAAAUAA | 367 | GUUUUAGAGCUAGAAAUAGCAAGUUAAAAUAAGGCU |
| G015697 | | GGCUAGUCCGUUAUGAACUUGGCACCGAGUCGG | | AGUCCGUUAUGAACUUGGCACCGAGUCGG*mU*mG*m |
| | | UGC | | C |
| C- | 268 | GUUUUAGAGCUAGAAAUAGCAAGUUAAAAUAA | 368 | GUUUUAGAGCUAGAAAUAGCAAGUUAAAAUAAGGCU |
| G015698 | | GGCUAGUCCGUUAUCAACUUGGGACCGAGUCGG | | AGUCCGUUAUCAACUUGGGACCGAGUCGG*mU*mC*m |
| | | UCC | | C |
| C- | 269 | GUUUUAGAGCUAGAAAUAGCAAGUUAAAAUAA | 369 | GUUUUAGAGCUAGAAAUAGCAAGUUAAAAUAAGGCU |
| G015699 | | GGCUAGUCCGUUAUCAACUUGGAACCGAGUCGG | | AGUCCGUUAUCAACUUGGAACCGAGUCGG*mU*mU*m |
| | | UUC | | C |
| C- | 270 | GUUUUCGAGCGAGAAAUCGCGAGUGAAAAUGA | 370 | GUUUUCGAGCGAGAAAUCGCGAGUGAAAAUGAGGCU |
| G015700 | | GGCUGGUCCGUUGUGAACUUGGAACCGAGUCGG | | GGUCCGUUGUGAACUUGGAACCGAGUCGG*mU*mU*m |
| | | UUC | | C |
| C- | 271 | GUUUUUGAGCGAGAAAUCGCAAGUAAAAAUAA | 371 | GUUUUUGAGCGAGAAAUCGCAAGUAAAAAUAAGGCU |
| G015701 | | GGCUCGUCCGUUCUGAACUUGGAACCGAGUCGG | | CGUCCGUUCUGAACUUGGAACCGAGUCGG*mU*mU*m |
| | | UUC | | C |
| C- | 272 | GUUUCGGAGCCGGAAACGGCGAGUCGAAAUGA | 372 | GUUUCGGAGCCGGAAACGGCGAGUCGAAAUGAGGCU |
| G015702 | | GGCUGGUCCGUUGUCGGCUCGGAACCGAGUCGG | | GGUCCGUUGUCGGCUCGGAACCGAGUCGG*mU*mU*m |
| | | UUC | | C |
| C- | 273 | GUUUUAGAGCUAGAAAUAGCAAGUUAAAAUAA | 373 | GUUUUAGAGCUAGAAAUAGCAAGUUAAAAUAAGGCU |
| G015703 | | GGCUAGUCCGUUAUCAACUUGGCACCGAGUCGG | | AGUCCGUUAUCAACUUGGCACCGAGUCGG*mU*mG*m |
| | | UGC | | C |
| C- | 274 | GUUUUAGAGCUAGAAAUAGCAAGUUAAAAUAA | 374 | GUUUUAGAGCUAGAAAUAGCAAGUUAAAAUAAGGCU |
| G015704 | | GGCUAGUCCGUUAUCAACUUGGCACCGAGUCGG | | AGUCCGUUAUCAACUUGGCACCGAGUCGG*mU*mG*m |
| | | UGC | | C |
| C- | 275 | GUUUUAGAGCUAGAAAUAGCAAGUUAAAAUAA | 375 | GUUUUAGAGCUAGAAAUAGCAAGUUAAAAUAAGGCU |
| G015705 | | GGCUAGUCCGUUAUCAACUUGGCACCGAGUCGG | | AGUCCGUUAUCAACUUGGCACCGAGUCGG*mU*mG*m |
| | | UGC | | C |
| C- | 276 | GUUUUAGAGCUAGAAAUAGCAAGUUAAAAUAA | 376 | GUUUUAGAGCUAGAAAUAGCAAGUUAAAAUAAGGCU |
| G015706 | | GGCUAGUCCGUUAUCAACUUGGCACCGAGUCGG | | AGUCCGUUAUCAACUUGGCACCGAGUCGG*mU*mG*m |
| | | UGC | | C |
| C- | 277 | GUUUUAGAGCUAGAAAUAGCAAGUUAAAAUAA | 377 | GUUUUAGAGCUAGAAAUAGCAAGUUAAAAUAAGGCU |
| G015707 | | GGCUAGUCCGUUAUCAACUUGGCACCGAGUCGG | | AGUCCGUUAUCAACUUGGCACCGAGUCGG*mU*mG*m |
| | | UGC | | C |
| C- | 278 | GUUUUAGAGCUAGAAAUAGCAAGUUAAAAUAA | 378 | GUUUUAGAGCUAGAAAUAGCAAGUUAAAAUAAGGCU |
| G015708 | | GGCUAGUCCGUUAUCAACUUGGCACCGAGUCGG | | AGUCCGUUAUCAACUUGGCACCGAGUCGG*mU*mG*m |
| | | UGC | | C |
| C- | 279 | GUUUUAGAGCUAGAAAUAGCAAGUUAAAAUAA | 379 | GUUUUAGAGCUAGAAAUAGCAAGUUAAAAUAAGGCU |
| G015709 | | GGCUAGUCCGUUAUCAACUUGGCACCGAGUCGG | | AGUCCGUUAUCAACUUGGCACCGAGUCGG*mU*mG*m |
| | | UGC | | C |
| C- | 280 | GUUUUAGAGCUAGAAAUAGCAAGUUAAAAUAA | 380 | GUUUUAGAGCUAGAAAUAGCAAGUUAAAAUAAGGCU |
| G017275 | | GGCUAGUCCGUUAUCAACUUGGCACCGAGUCGG | | AGUCCGUUAUCAACUUGGCACCGAGUCGG*mU*mG*m |
| | | UGC | | C |
| C- | 281 | GUUUUAGAGCUAGAAAUAGCAAGUUAAAAUAA | 381 | GUUUUAGAmGmCmUmAmGmAmAmAmUmAmGmCAAG |
| G017276 | | GGCUAGUCCGUUAUCACGAAAGGGCACCGAGUC | | UUAAAAUAAGGCUAGUCCGUUAUCACGAAAGGGCAC |
| | | GGUGC | | CGAGUCGG*mU*mG*mC |
| C- | 282 | GUUUUAGAGCUAGAAAUAGCAAGUUAAAAUAA | 382 | GUUUUAGAmGmCmUmAmGmAmAmAmUmAmGmCAAG |
| G017277 | | GGCUAGUCCGUUAUCAAAAAUGGCACCGAGUCG | | UUAAAAUAAGGCUAGUCCGUUAUCAAAAAUGGCACC |
| | | GUGC | | GAGUCGG*mU*mG*mC |
| C- | 283 | GUUUUAGAGCUAGAAAUAGCAAGUUAAAAUAA | 383 | GUUUUAGAmGmCmUmAmGmAmAmAmUmAmGmCAAG |
| G017278 | | GGCUAGUCCGUUAUCACAAGGGCACCGAGUCGG | | UUAAAAUAAGGCUAGUCCGUUAUCACAAGGGCACCG |
| | | UGC | | AGUCGG*mU*mG*mC |
| C- | 284 | GUUUUAGAGCUAGAAAUAGCAAGUUAAAAUAA | 384 | GUUUUAGAmGmCmUmAmGmAmAmAmUmAmGmCAAG |
| G017279 | | GGCUAGUCCGUUAUCAAAAUGGCACCGAGUCGG | | UUAAAAUAAGGCUAGUCCGUUAUCAAAAUGGCACCG |
| | | UGC | | AGUCGG*mU*mG*mC |
| C- | 285 | GUUUUAGAGCGCGAAGCGCAAGUUAAAAUAAG | 385 | GUUUUAGAGCGCGAAGCGCAAGUUAAAAUAAGGCUA |
| G017280 | | GCUAGUCCGUUAUCAAAAUGGCACCGAGUCGGU | | GUCCGUUAUCAAAAUGGCACCGAGUCGG*mU*mG*mC |
| | | GC | | |
| C- | 286 | GUUUUAGAGCUGAAAAGCAAGUUAAAAUAAGG | 386 | GUUUUAGAGCUGAAAAGCAAGUUAAAAUAAGGCUAG |
| G017281 | | CUAGUCCGUUAUCAAAAUGGCACCGAGUCGGUG | | UCCGUUAUCAAAAUGGCACCGAGUCGG*mU*mG*mC |
| | | C | | |
| C- | 287 | GUUUUAGAGCGAAAGCAAGUUAAAAUAAGGCU | 387 | GUUUUAGAGCGAAAGCAAGUUAAAAUAAGGCUAGUC |
| G017282 | | AGUCCGUUAUCAAAAUGGCACCGAGUCGGUGC | | CGUUAUCAAAAUGGCACCGAGUCGG*mU*mG*mC |
| C- | 288 | GUUUUAGAGCAAAGCAAGUUAAAAUAAGGCUA | 388 | GUUUUAGAGCAAAGCAAGUUAAAAUAAGGCUAGUCC |
| G017283 | | GUCCGUUAUCAAAAUGGCACCGAGUCGGUGC | | GUUAUCAAAAUGGCACCGAGUCGG*mU*mG*mC |
| C- | 289 | GUUUUAGAGCGAAAGCAAGUUAAAAUAAGGCU | 389 | GUUUUAGAmGmCmGmAmAmAmGmCAAGUUAAAAUA |
| G013773 | | AGUCCGUUAUCAACUUGGCACCGAGUCGGUGC | | AGGCUAGUCCGUUAUCAACUUGGCACCGAGUCGG*m |
| | | | | U*mG*mC |
| C- | 290 | GUUUUAGAGCGAAAGCAAGUUAAAAUAAGGCU | 390 | GUUUUAGAmGmCmGmAmAmAmGmCAAGUUAAAAUA |
| G013776 | | AGUCCGUUAUCAAGAAAUGGCACCGAGUCGGUG | | AGGCUAGUCCGUUAUCAAGAAAUGGCACCGAGUCGG |
| | | C | | *mU*mG*mC |
| C-SM07-6 | 291 | GUUUUAGAGCUAGAAAUAGCAAGUUAAAAUAA | 391 | GUUUUAGAmGmCmUmAmGmAmAmAmUmAmGmCAAG |
| | | GGCUAGUCCGUUAUCACGAAAGGGCACCGAGUC | | UUAAAAUAAGGCUAGUCCGUUAUCAmCmGmAmAmA |
| | | GGUGC | | mGmGmGmCmAmCmCmGmAmGmUmCmGmG*mU*mG* |
| | | | | mC |
| C-SM12-6 | 292 | GUUUUAGAGCUAGAAAUAGCAAGUUAAAAUAA | 392 | GUUUUAGAmGmCmUmAmGmAmAmAmUmAmGmCAAG |
| | | GGCUAGUCCGUUAUCAAAAUGGCACCGAGUCGG | | UUAAAAUAAGGCUAGUCCGUUAUCAmAmAmAmUmG |
| | | UGC | | mGmCmAmCmCmGmAmGmUmCmGmG*mU*mG*mC |
| C-SM07- | 293 | GUUUUAGAGCUAGAAAUAGCAAGUUAAAAUAA | 393 | GUUUUAGAmGmCmUmAmGmAmAmAmUmAmGmCAAG |
| 50 | | GGCUAGUCCGUUAUCACGAAAGGGCACCGAGUC | | UUAAAAUAAGGCUAGUCCGUUAUCACmGmAmAmAm |
| | | GGUGC | | GmGmGmCmAmCmCmGmAmGmUmCmGmG*mU*mG*m |
| | | | | C |
| C-SM12- | 294 | GUUUUAGAGCUAGAAAUAGCAAGUUAAAAUAA | 394 | GUUUUAGAmGmCmUmAmGmAmAmAmUmAmGmCAAG |
| 50 | | GGCUAGUCCGUUAUCAAAAUGGCACCGAGUCGG | | UUAAAAUAAGGCUAGUCCGUUAUCAAmAmAmUmGm |
| | | UGC | | GmCmAmCmCmGmAmGmUmCmGmG*mU*mG*mC |
| | 295- | Not Used | 395- | Not Used |
| | 300 | | 399 | |
| | 400 | See Table 2 | | |
| Nx- | 401 | N₃NₓGUUUUAGAGCUAGAAAUAGCAAGUUAAAA | 501 | (mN*)₃NₓGUUUUAGAGCUAGAAAUAGCAAGUUAAAAU |
| G015631 | | UAAGGCUAGUCCGUUAUCAACUAAGCACCGAGU | | AAGGCUAGUCCGUUAUCAACUAAGCACCGAGUCGG* |
| | | CGGUGC | | mU*mG*mC |
| Nx- | 402 | N₃NₓGUUUUAGAGCUAGAAAUAGCAAGUUAAAA | 502 | (mN*)₃NₓGUUUUAGAGCUAGAAAUAGCAAGUUAAAAU |
| G015632 | | UAAGGCUAGUCCGUUAUCAACUCAGCACCGAGU | | AAGGCUAGUCCGUUAUCAACUCAGCACCGAGUCGG* |
| | | CGGUGC | | mU*mG*mC |
| Nx- | 403 | N₃NₓGUUUUAGAGCUAGAAAUAGCAAGUUAAAA | 503 | (mN*)₃NₓGUUUUAGAGCUAGAAAUAGCAAGUUAAAAU |
| G015633 | | UAAGGCUAGUCCGUUAUCCACUUGGCACCGAGU | | AAGGCUAGUCCGUUAUCCACUUGGCACCGAGUCGG* |
| | | CGGUGC | | mU*mG*mC |
| Nx- | 404 | N₃NₓGUUUUAGAGCUAGAAAUAGCAAGUUAAAA | 504 | (mN*)₃NₓGUUUUAGAGCUAGAAAUAGCAAGUUAAAAU |
| G015634 | | UACGGCUAGUCCGUUAUCAACUUGGCACCGAGU | | ACGGCUAGUCCGUUAUCAACUUGGCACCGAGUCGG* |
| | | CGGUGC | | mU*mG*mC |
| Nx- | 405 | N₃NₓGUUUUAGAGCUAGAAAUAGCAAGUUAAAA | 505 | (mN*)₃NₓGUUUUAGAGCUAGAAAUAGCAAGUUAAAAU |
| G015635 | | UAAGGCUAGUCCGUUAUCAAGAGCUGGCACCGA | | AAGGCUAGUCCGUUAUCAAGAGCUGGCACCGAGUCG |
| | | GUCGGUGC | | G*mU*mG*mC |
| Nx- | 406 | N₃NₓGUUUUAGAGCUAGAAAUAGCAAGUUAAAA | 506 | (mN*)₃NₓGUUUUAGAGCUAGAAAUAGCAAGUUAAAAU |
| G015636 | | UAAGGCUAGUCCGUUAUCAAGAAAUGGCACCGA | | AAGGCUAGUCCGUUAUCAAGAAAUGGCACCGAGUCG |
| | | GUCGGUGC | | G*mU*mG*mC |
| Nx- | 407 | N₃NₓGUUUUAGAGCUAGAAAUAGCAAGUUAAAA | 507 | (mN*)₃NₓGUUUUAGAGCUAGAAAUAGCAAGUUAAAAU |
| G015637 | | UAAGGCUAGUCCGUUAUCACGAAAGGGCACCGA | | AAGGCUAGUCCGUUAUCACGAAAGGGCACCGAGUCG |
| | | GUCGGUGC | | G*mU*mG*mC |
| Nx- | 408 | N₃NₓGUUUUAGAGCUAGAAAUAGCAAGUUAAAA | 508 | (mN*)₃NₓGUUUUAGAGCUAGAAAUAGCAAGUUAAAAU |
| G015638 | | UAAGGCUAGUCCGUUAUCAAAAAUGGCACCGAG | | AAGGCUAGUCCGUUAUCAAAAAUGGCACCGAGUCGG |
| | | UCGGUGC | | *mU*mG*mC |
| Nx- | 409 | N₃NₓGUUUUAGAGCUAGAAAUAGCAAGUUAAAA | 509 | (mN*)₃NₓGUUUUAGAGCUAGAAAUAGCAAGUUAAAAU |
| G015639 | | UAAGGCUAGUCCGUUAUCAAAAGUGGCACCGAG | | AAGGCUAGUCCGUUAUCAAAAGUGGCACCGAGUCGG |
| | | UCGGUGC | | *mU*mG*mC |
| Nx- | 410 | N₃NₓGUUUUAGAGCUAGAAAUAGCAAGUUAAAA | 510 | (mN*)₃NₓGUUUUAGAGCUAGAAAUAGCAAGUUAAAAU |
| G015640 | | UAAGGCUAGUCCGUUAUCAACAGUGGCACCGAG | | AAGGCUAGUCCGUUAUCAACAGUGGCACCGAGUCGG |
| | | UCGGUGC | | *mU*mG*mC |
| Nx- | 411 | N₃NₓGUUUUAGAGCUAGAAAUAGCAAGUUAAAA | 511 | (mN*)₃NₓGUUUUAGAGCUAGAAAUAGCAAGUUAAAAU |
| G015641 | | UAAGGCUAGUCCGUUAUCACAAGGGCACCGAGU | | AAGGCUAGUCCGUUAUCACAAGGGCACCGAGUCGG* |
| | | CGGUGC | | mU*mG*mC |
| Nx- | 412 | N₃NₓGUUUUAGAGCUAGAAAUAGCAAGUUAAAA | 512 | (mN*)₃NₓGUUUUAGAGCUAGAAAUAGCAAGUUAAAAU |
| G015642 | | UAAGGCUAGUCCGUUAUCAAAAUGGCACCGAGU | | AAGGCUAGUCCGUUAUCAAAAUGGCACCGAGUCGG* |
| | | CGGUGC | | mU*mG*mC |
| Nx- | 413 | N₃NₓGUUUUAGAGCUAGAAAUAGCAAGUUAAAA | 513 | (mN*)₃NₓGUUUUAGAGCUAGAAAUAGCAAGUUAAAAU |
| G015643 | | UAAGGCUAGUCCGUUAUCAAAGGCACCGAGUCG | | AAGGCUAGUCCGUUAUCAAAGGCACCGAGUCGG*mU* |
| | | GUGC | | mG*mC |
| Nx- | 414 | N₃NₓGUUUUAGAGCUAGAAAUAGCAAGUUAAAA | 514 | (mN*)₃NₓGUUUUAGAGCUAGAAAUAGCAAGUUAAAAU |
| G015644 | | UAAGGCUAGUCCGUUAUCAAGGGCACCGAGUCG | | AAGGCUAGUCCGUUAUCAAGGGCACCGAGUCGG*mU* |
| | | GUGC | | mG*mC |
| Nx- | 415 | N₃NₓGUUUUAGAGCUAGAAAUAGCAAGUUAAAA | 515 | (mN*)₃NₓGUUUUAGAGCUAGAAAUAGCAAGUUAAAAU |
| G015645 | | UAAGGCUAGUCCGUUAUCAGGCACCGAGUCGGU | | AAGGCUAGUCCGUUAUCAGGCACCGAGUCGG*mU*m |
| | | GC | | G*mC |
| Nx- | 416 | N₃NₓGUUUUAGAGCUAGAAUAGCAAGUUAAAAU | 516 | (mN*)₃NₓGUUUUAGAGCUAGAAUAGCAAGUUAAAAUA |
| G015646 | | AAGGCUAGUCCGUUAUCAACUUGGCACCGAGUC | | AGGCUAGUCCGUUAUCAACUUGGCACCGAGUCGG*m |
| | | GGUGC | | U*mG*mC |
| Nx- | 417 | N₃NₓGUUUUAGAGCGCAAAGCGCAAGUUAAAAU | 517 | (mN*)₃NₓGUUUUAGAGCGCAAAGCGCAAGUUAAAAUA |
| G015647 | | AAGGCUAGUCCGUUAUCAACUUGGCACCGAGUC | | AGGCUAGUCCGUUAUCAACUUGGCACCGAGUCGG*m |
| | | GGUGC | | U*mG*mC |
| Nx- | 418 | N₃NₓGUUUUAGAGCGCGAAGCGCAAGUUAAAAU | 518 | (mN*)₃NₓGUUUUAGAGCGCGAAGCGCAAGUUAAAAUA |
| G015648 | | AAGGCUAGUCCGUUAUCAACUUGGCACCGAGUC | | AGGCUAGUCCGUUAUCAACUUGGCACCGAGUCGG*m |
| | | GGUGC | | U*mG*mC |
| Nx- | 419 | N₃NₓGUUUUAGAGCGGAAACGCAAGUUAAAAUA | 519 | (mN*)₃NₓGUUUUAGAGCGGAAACGCAAGUUAAAAUAA |
| G015649 | | AGGCUAGUCCGUUAUCAACUUGGCACCGAGUCG | | GGCUAGUCCGUUAUCAACUUGGCACCGAGUCGGU*m |
| | | GUGCU | | G*mC*mU |
| Nx- | 420 | N₃NₓGUUUUAGAGCGGAAACGCAAGUUAAAAUA | 520 | (mN*)₃NₓGUUUUAGAGCGGAAACGCAAGUUAAAAUAA |
| G015650 | | AGGCUAGUCCGUUAUCAACUUGGCACCGAGUCG | | GGCUAGUCCGUUAUCAACUUGGCACCGAGUCGG*mU* |
| | | GUGC | | mG*mC |
| Nx- | 421 | N₃NₓGUUUUAGAGCCGAAAGGCAAGUUAAAAUA | 521 | (mN*)₃NₓGUUUUAGAGCCGAAAGGCAAGUUAAAAUAA |
| G015651 | | AGGCUAGUCCGUUAUCAACUUGGCACCGAGUCG | | GGCUAGUCCGUUAUCAACUUGGCACCGAGUCGG*mU* |
| | | GUGC | | mG*mC |
| Nx- | 422 | N₃NₓGUUUUAGAGCUGAAAAGCAAGUUAAAAUA | 522 | (mN*)₃NₓGUUUUAGAGCUGAAAAGCAAGUUAAAAUAA |
| G015652 | | AGGCUAGUCCGUUAUCAACUUGGCACCGAGUCG | | GGCUAGUCCGUUAUCAACUUGGCACCGAGUCGG*mU* |
| | | GUGC | | mG*mC |
| Nx- | 423 | N₃NₓGUUUUAGAGCGAAAGCAAGUUAAAAUAAG | 523 | (mN*)₃NₓGUUUUAGAGCGAAAGCAAGUUAAAAUAAGG |
| G015653 | | GCUAGUCCGUUAUCAACUUGGCACCGAGUCGGU | | CUAGUCCGUUAUCAACUUGGCACCGAGUCGG*mU*mG |
| | | GC | | *mC |
| Nx- | 424 | N₃NₓGUUUUAGAGCGAAGCAAGUUAAAAUAAGG | 524 | (mN*)₃NₓGUUUUAGAGCGAAGCAAGUUAAAAUAAGGC |
| G015654 | | CUAGUCCGUUAUCAACUUGGCACCGAGUCGGUG | | UAGUCCGUUAUCAACUUGGCACCGAGUCGG*mU*mG* |
| | | C | | mC |
| Nx- | 425 | N₃NₓGUUUUAGAGCAAAGCAAGUUAAAAUAAGG | 525 | (mN*)₃NₓGUUUUAGAGCAAAGCAAGUUAAAAUAAGGC |
| G015655 | | CUAGUCCGUUAUCAACUUGGCACCGAGUCGGUG | | UAGUCCGUUAUCAACUUGGCACCGAGUCGG*mU*mG* |
| | | C | | mC |
| Nx- | 426 | N₃NₓGUUUUAGAGGAAACAAGUUAAAAUAAGGC | 526 | (mN*)₃NₓGUUUUAGAGGAAACAAGUUAAAAUAAGGCU |
| G015656 | | UAGUCCGUUAUCAACUUGGCACCGAGUCGGUGC | | AGUCCGUUAUCAACUUGGCACCGAGUCGG*mU*mG*m |
| | | | | C |
| Nx- | 427 | N₃NₓGUUUUAGAGCAAGCAAGUUAAAAUAAGGC | 527 | (mN*)₃NₓGUUUUAGAGCAAGCAAGUUAAAAUAAGGCU |
| G015657 | | UAGUCCGUUAUCAACUUGGCACCGAGUCGGUGC | | AGUCCGUUAUCAACUUGGCACCGAGUCGG*mU*mG*m |
| | | | | C |
| Nx- | 428 | N₃NₓGUUUUAGAGCGAGCAAGUUAAAAUAAGGC | 528 | (mN*)₃NₓGUUUUAGAGCGAGCAAGUUAAAAUAAGGCU |
| G015658 | | UAGUCCGUUAUCAACUUGGCACCGAGUCGGUGC | | AGUCCGUUAUCAACUUGGCACCGAGUCGG*mU*mG*m |
| | | | | C |
| Nx- | 429 | N₃NₓGUUUUAGAGCGCAAGUUAAAAUAAGGCUA | 529 | (mN*)₃NₓGUUUUAGAGCGCAAGUUAAAAUAAGGCUAG |
| G015659 | | GUCCGUUAUCAACUUGGCACCGAGUCGGUGC | | UCCGUUAUCAACUUGGCACCGAGUCGG*mU*mG*mC |
| Nx- | 430 | N₃NₓGUUUUAGAGAACAAGUUAAAAUAAGGCUA | 530 | (mN*)₃NₓGUUUUAGAGAACAAGUUAAAAUAAGGCUAG |
| G015660 | | GUCCGUUAUCAACUUGGCACCGAGUCGGUGC | | UCCGUUAUCAACUUGGCACCGAGUCGG*mU*mG*mC |
| Nx- | 431 | N₃NₓGUUUUAGAGACAAGUUAAAAUAAGGCUAG | 531 | (mN*)₃NₓGUUUUAGAGACAAGUUAAAAUAAGGCUAGU |
| G015661 | | UCCGUUAUCAACUUGGCACCGAGUCGGUGC | | CCGUUAUCAACUUGGCACCGAGUCGG*mU*mG*mC |
| Nx- | 432 | N₃NₓGUUUUAGAGCAAGUUAAAAUAAGGCUAGU | 532 | (mN*)₃NₓGUUUUAGAGCAAGUUAAAAUAAGGCUAGUC |
| G015662 | | CCGUUAUCAACUUGGCACCGAGUCGGUGC | | CGUUAUCAACUUGGCACCGAGUCGG*mU*mG*mC |
| Nx- | 433 | N₃NₓGUUUUAGAAAAAGUUAAAAUAAGGCUAGU | 533 | (mN*)₃NₓGUUUUAGAAAAAGUUAAAAUAAGGCUAGUC |
| G015663 | | CCGUUAUCAACUUGGCACCGAGUCGGUGC | | CGUUAUCAACUUGGCACCGAGUCGG*mU*mG*mC |
| Nx- | 434 | N₃NₓGUUUUAGAAAAGUUAAAAUAAGGCUAGUC | 534 | (mN*)₃NₓGUUUUAGAAAAGUUAAAAUAAGGCUAGUCC |
| G015664 | | CGUUAUCAACUUGGCACCGAGUCGGUGC | | GUUAUCAACUUGGCACCGAGUCGG*mU*mG*mC |
| Nx- | 435 | N₃NₓGUUUUAGAGCUAGAAAUAGCAAGUUAAAA | 535 | (mN*)₃NₓGUUUUAGAGCUAGAAAUAGCAAGUUAAAAU |
| G015665 | | UAAGGCUAGUCCGUUAUCAACUUGGCACCGAGU | | AAGGCUAGUCCGUUAUCAACUUGGCACCGAGUCG*m |
| | | CGGUG | | G*mU*mG |
| Nx- | 436 | N₃NₓGUUUUAGAGCUAGAAAUAGCAAGUUAAAA | 536 | (mN*)₃NₓGUUUUAGAGCUAGAAAUAGCAAGUUAAAAU |
| G015666 | | UAAGGCUAGUCCGUUAUCAACUUGGCACCGAGU | | AAGGCUAGUCCGUUAUCAACUUGGCACCGAGUC*mG* |
| | | CGGU | | mG*mU |
| Nx- | 437 | N₃NₓGUUUUAGAGCUAGAAAUAGCAAGUUAAAA | 537 | (mN*)₃NₓGUUUUAGAGCUAGAAAUAGCAAGUUAAAAU |
| G015667 | | UAAGGCUAGUCCGUUAUCAACUUGGCACCGAGU | | AAGGCUAGUCCGUUAUCAACUUGGCACCGAGU*mC*m |
| | | CGG | | G*mG |
| Nx- | 438 | N₃NₓGUUUUAGAGCUAGAAAUAGCAAGUUAAAA | 538 | (mN*)₃NₓGUUUUAGAGCUAGAAAUAGCAAGUUAAAAU |
| G015668 | | UAAGGCUAGUCCGUUAUCAACUUGGCACCGAGU | | AAGGCUAGUCCGUUAUCAACUUGGCACCGAG*mU*mC |
| | | CG | | *mG |
| Nx- | 439 | N₃NₓGUUUUAGAGCUAGAAAUAGCAAGUUAAAA | 539 | (mN*)₃NₓGUUUUAGAGCUAGAAAUAGCAAGUUAAAAU |
| G015669 | | UAAGGCUAGUCCGUUAUCAACUUGGCACCGAGU | | AAGGCUAGUCCGUUAUCAACUUGGCACCGA*mG*mU* |
| | | C | | mC |
| Nx- | 440 | N₃NₓGUUUUAGAGCUAGAAAUAGCAAGUUAAAA | 540 | (mN*)₃NₓGUUUUAGAGCUAGAAAUAGCAAGUUAAAAU |
| G015670 | | UAAGGCUAGUCCGUUAUCAACUUGGCACCGAGU | | AAGGCUAGUCCGUUAUCAACUUGGCACCG*mA*mG*m |
| | | | | U |
| Nx- | 441 | N₃NₓGUUUUAGAGCGAAAGCAAGUUAAAAUAAG | 541 | (mN*)₃NₓGUUUUAGAGCGAAAGCAAGUUAAAAUAAGG |
| G015671 | | GCUAGUCCGUUAUCACUGGCACCGAGUCGGUGC | | CUAGUCCGUUAUCACUGGCACCGAGUCGG*mU*mG*m |
| | | | | C |
| Nx- | 442 | N₃NₓGUUUUAGAGCGAAAGCAAGUUAAAAUAAG | 542 | (mN*)₃NₓGUUUUAGAGCGAAAGCAAGUUAAAAUAAGG |
| G015672 | | GCUAGUCCGUUAUCAGGCACCGAGUCGGUGC | | CUAGUCCGUUAUCAGGCACCGAGUCGG*mU*mG*mC |
| Nx- | 443 | N₃NₓGUUUUAGAGAAAAAGUUAAAAUAAGGCUA | 543 | (mN*)₃NₓGUUUUAGAGAAAAAGUUAAAAUAAGGCUAG |
| G015673 | | GUCCGUUAUCAACUUGGCACCGAGUCGGUGC | | UCCGUUAUCAACUUGGCACCGAGUCGG*mU*mG*mC |
| Nx- | 444 | N₃NₓGUUUUAGAGGAAACAAGUUAAAAUAAGGC | 544 | (mN*)₃NₓGUUUUAGAGGAAACAAGUUAAAAUAAGGCU |
| G015674 | | UAGUCCGUUAUCAAUGGCACCGAGUCGGUGC | | AGUCCGUUAUCAAUGGCACCGAGUCGG*mU*mG*mC |
| Nx- | 445 | N₃NₓGUUUUAGAGAAAAAGUUAAAAUAAGGCUA | 545 | (mN*)₃NₓGUUUUAGAGAAAAAGUUAAAAUAAGGCUAG |
| G015675 | | GUCCGUUAUCAAUGGCACCGAGUCGGUGC | | UCCGUUAUCAAUGGCACCGAGUCGG*mU*mG*mC |
| Nx- | 446 | N₃NₓGUUUUAGAGGAAACAAGUUAAAAUAAGGC | 546 | (mN*)₃NₓGUUUUAGAGGAAACAAGUUAAAAUAAGGCU |
| G015676 | | UAGUCCGUUAUCACUGGCACCGAGUCGGUGC | | AGUCCGUUAUCACUGGCACCGAGUCGG*mU*mG*mC |
| Nx- | 447 | N₃NₓGUUUUAGAGAAAAAGUUAAAAUAAGGCUA | 547 | (mN*)₃NₓGUUUUAGAGAAAAAGUUAAAAUAAGGCUAG |
| G015677 | | GUCCGUUAUCAGGCACCGAGUCGGUGC | | UCCGUUAUCAGGCACCGAGUCGG*mU*mG*mC |
| Nx- | 448 | N₃NₓGUUUUAGAGCGAAAGCAAGUUAAAAUAAG | 548 | (mN*)₃NₓGUUUUAGAGCGAAAGCAAGUUAAAAUAAGG |
| G015678 | | GCUAGUCCGUUAUCAAGCUAUGGCACCGAGUCG | | CUAGUCCGUUAUCAAGCUAUGGCACCGAGUCGG*mU* |
| | | GUGC | | mG*mC |
| Nx- | 449 | N₃NₓGUUUUAGAGCUAGAAAUAGCAAGUUAAAA | 549 | (mN*)₃NₓGUUUUAGAGCUAGAAAUAGCAAGUUAAAAU |
| G015679 | | UAAGGCAGUCCGUUAUCAACUUGGCACCGAGUC | | AAGGCAGUCCGUUAUCAACUUGGCACCGAGUCGG*m |
| | | GGUGC | | U*mG*mC |
| Nx- | 450 | N₃NₓGUUUUAGAGCUAGAAAUAGCAAGUUAAAA | 550 | (mN*)₃NₓGUUUUAGAGCUAGAAAUAGCAAGUUAAAAU |
| G015680 | | UAAGGCUGUCCGUUAUCAACUUGGCACCGAGUC | | AAGGCUGUCCGUUAUCAACUUGGCACCGAGUCGG*m |
| | | GGUGC | | U*mG*mC |
| Nx- | 451 | N₃NₓGUUUUAGAGCUAGAAAUAGCAAGUUAAAA | 551 | (mN*)₃NₓGUUUUAGAGCUAGAAAUAGCAAGUUAAAAU |
| G015681 | | UAAGGCGUCCGUUAUCAACUUGGCACCGAGUCG | | AAGGCGUCCGUUAUCAACUUGGCACCGAGUCGG*mU* |
| | | GUGC | | mG*mC |
| Nx- | 452 | N₃NₓGUUUUAGAGCUAGAAAUAGCAAGUUAAAA | 552 | (mN*)₃NₓGUUUUAGAGCUAGAAAUAGCAAGUUAAAAU |
| G015682 | | UAAGGUAUCCGUUAUCAACUUGGCACCGAGUCG | | AAGGUAUCCGUUAUCAACUUGGCACCGAGUCGG*mU* |
| | | GUGC | | mG*mC |
| Nx- | 453 | N₃NₓGUUUUAGAGCUAGAAAUAGCAAGUUAAAA | 553 | (mN*)₃NₓGUUUUAGAGCUAGAAAUAGCAAGUUAAAAU |
| G015683 | | UAAGGUUCCGUUAUCAACUUGGCACCGAGUCGG | | AAGGUUCCGUUAUCAACUUGGCACCGAGUCGG*mU* |
| | | UGC | | mG*mC |
| Nx- | 454 | N₃NₓGUUUUAGAGCUAGAAAUAGCAAGUUAAAA | 554 | (mN*)₃NₓGUUUUAGAGCUAGAAAUAGCAAGUUAAAAU |
| G015684 | | UAAGGAUCCGUUAUCAACUUGGCACCGAGUCGG | | AAGGAUCCGUUAUCAACUUGGCACCGAGUCGG*mU* |
| | | UGC | | mG*mC |
| Nx- | 455 | N₃NₓGUUUUCGAGCUAGAAAUAGCAAGUGAAAA | 555 | (mN*)₃NₓGUUUUCGAGCUAGAAAUAGCAAGUGAAAAU |
| G015685 | | UAAGGCUAGUCCGUUAUCAACUUGGCACCGAGU | | AAGGCUAGUCCGUUAUCAACUUGGCACCGAGUCGG* |
| | | CGGUGC | | mU*mG*mC |
| Nx- | 456 | N₃NₓGUUUUUGAGCUAGAAAUAGCAAGUAAAAA | 556 | (mN*)₃NₓGUUUUUGAGCUAGAAAUAGCAAGUAAAAAU |
| G015686 | | UAAGGCUAGUCCGUUAUCAACUUGGCACCGAGU | | AAGGCUAGUCCGUUAUCAACUUGGCACCGAGUCGG* |
| | | CGGUGC | | mU*mG*mC |
| Nx- | 457 | N₃NₓGUUUUAGAGCGAGAAAUCGCAAGUUAAAA | 557 | (mN*)₃NₓGUUUUAGAGCGAGAAAUCGCAAGUUAAAAU |
| G015687 | | UAAGGCUAGUCCGUUAUCAACUUGGCACCGAGU | | AAGGCUAGUCCGUUAUCAACUUGGCACCGAGUCGG* |
| | | CGGUGC | | mU*mG*mC |
| Nx- | 458 | N₃NₓGUUUUAGAGCUAGAAAUAGCGAGUUAAAA | 558 | (mN*)₃NₓGUUUUAGAGCUAGAAAUAGCGAGUUAAAAU |
| G015688 | | UAAGGCUAGUCCGUUAUCAACUUGGCACCGAGU | | AAGGCUAGUCCGUUAUCAACUUGGCACCGAGUCGG* |
| | | CGGUGC | | mU*mG*mC |
| Nx- | 459 | N₃NₓGUUUUAGAGCUAGAAAUAGCCGGUUAAAA | 559 | (mN*)₃NₓGUUUUAGAGCUAGAAAUAGCCGGUUAAAAU |
| G015689 | | UAAGGCUAGUCCGUUAUCAACUUGGCACCGAGU | | AAGGCUAGUCCGUUAUCAACUUGGCACCGAGUCGG* |
| | | CGGUGC | | mU*mG*mC |
| Nx- | 460 | N₃NₓGUUUUAGAGCUAGAAAUAGCAAGUUAAAA | 560 | (mN*)₃NₓGUUUUAGAGCUAGAAAUAGCAAGUUAAAAU |
| G015690 | | UGAGGCUAGUCCGUUAUCAACUUGGCACCGAGU | | GAGGCUAGUCCGUUAUCAACUUGGCACCGAGUCGG* |
| | | CGGUGC | | mU*mG*mC |
| Nx- | 461 | N₃NₓGUUUUAGAGCUAGAAAUAGCAAGUUAAAA | 561 | (mN*)₃NₓGUUUUAGAGCUAGAAAUAGCAAGUUAAAAU |
| G015691 | | UAAGGCUGGUCCGUUAUCAACUUGGCACCGAGU | | AAGGCUGGUCCGUUAUCAACUUGGCACCGAGUCGG* |
| | | CGGUGC | | mU*mG*mC |
| Nx- | 462 | N₃NₓGUUUUAGAGCUAGAAAUAGCAAGUUAAAA | 562 | (mN*)₃NₓGUUUUAGAGCUAGAAAUAGCAAGUUAAAAU |
| G015692 | | UAAGGCUCGUCCGUUAUCAACUUGGCACCGAGU | | AAGGCUCGUCCGUUAUCAACUUGGCACCGAGUCGG* |
| | | CGGUGC | | mU*mG*mC |
| Nx- | 463 | N₃NₓGUUUUAGAGCUAGAAAUAGCAAGUUAAAA | 563 | (mN*)₃NₓGUUUUAGAGCUAGAAAUAGCAAGUUAAAAU |
| G015693 | | UAAGGCUUGUCCGUUAUCAACUUGGCACCGAGU | | AAGGCUUGUCCGUUAUCAACUUGGCACCGAGUCGG* |
| | | CGGUGC | | mU*mG*mC |
| Nx- | 464 | N₃NₓGUUUUAGAGCUAGAAAUAGCAAGUUAAAA | 564 | (mN*)₃NₓGUUUUAGAGCUAGAAAUAGCAAGUUAAAAU |
| G015694 | | UAAGGCUAGUCCGUUGUCAACUUGGCACCGAGU | | AAGGCUAGUCCGUUGUCAACUUGGCACCGAGUCGG* |
| | | CGGUGC | | mU*mG*mC |
| Nx- | 465 | N₃NₓGUUUUAGAGCUAGAAAUAGCAAGUUAAAA | 565 | (mN*)₃NₓGUUUUAGAGCUAGAAAUAGCAAGUUAAAAU |
| G015695 | | UAAGGCUAGUCCGUUCUCAACUUGGCACCGAGU | | AAGGCUAGUCCGUUCUCAACUUGGCACCGAGUCGG* |
| | | CGGUGC | | mU*mG*mC |
| Nx- | 466 | N₃NₓGUUUUAGAGCUAGAAAUAGCAAGUUAAAA | 566 | (mN*)₃NₓGUUUUAGAGCUAGAAAUAGCAAGUUAAAAU |
| G015696 | | UAAGGCUAGUCCGUUUUCAACUUGGCACCGAGU | | AAGGCUAGUCCGUUUUCAACUUGGCACCGAGUCGG* |
| | | CGGUGC | | mU*mG*mC |
| Nx- | 467 | N₃NₓGUUUUAGAGCUAGAAAUAGCAAGUUAAAA | 567 | (mN*)₃NₓGUUUUAGAGCUAGAAAUAGCAAGUUAAAAU |
| G015697 | | UAAGGCUAGUCCGUUAUGAACUUGGCACCGAGU | | AAGGCUAGUCCGUUAUGAACUUGGCACCGAGUCGG* |
| | | CGGUGC | | mU*mG*mC |
| Nx- | 468 | N₃NₓGUUUUAGAGCUAGAAAUAGCAAGUUAAAA | 568 | (mN*)₃NₓGUUUUAGAGCUAGAAAUAGCAAGUUAAAAU |
| G015698 | | UAAGGCUAGUCCGUUAUCAACUUGGGACCGAGU | | AAGGCUAGUCCGUUAUCAACUUGGGACCGAGUCGG* |
| | | CGGUCC | | mU*mC*mC |
| Nx- | 469 | N₃NₓGUUUUAGAGCUAGAAAUAGCAAGUUAAAA | 569 | (mN*)₃NₓGUUUUAGAGCUAGAAAUAGCAAGUUAAAAU |
| G015699 | | UAAGGCUAGUCCGUUAUCAACUUGGAACCGAGU | | AAGGCUAGUCCGUUAUCAACUUGGAACCGAGUCGG* |
| | | CGGUUC | | mU*mU*mC |
| Nx- | 470 | N₃NₓGUUUUCGAGCGAGAAAUCGCGAGUGAAAA | 570 | (mN*)₃NₓGUUUUCGAGCGAGAAAUCGCGAGUGAAAAU |
| G015700 | | UGAGGCUGGUCCGUUGUGAACUUGGAACCGAG | | GAGGCUGGUCCGUUGUGAACUUGGAACCGAGUCGG* |
| | | UCGGUUC | | mU*mU*mC |
| Nx- | 471 | N₃NₓGUUUUUGAGCGAGAAAUCGCAAGUAAAAA | 571 | (mN*)₃NₓGUUUUUGAGCGAGAAAUCGCAAGUAAAAAU |
| G015701 | | UAAGGCUCGUCCGUUCUGAACUUGGAACCGAGU | | AAGGCUCGUCCGUUCUGAACUUGGAACCGAGUCGG* |
| | | CGGUUC | | mU*mU*mC |
| Nx- | 472 | N₃NₓGUUUCGGAGCCGGAAACGGCGAGUCGAAAU | 572 | (mN*)₃NₓGUUUCGGAGCCGGAAACGGCGAGUCGAAAU |
| G015702 | | GAGGCUGGUCCGUUGUCGGCUCGGAACCGAGUC | | GAGGCUGGUCCGUUGUCGGCUCGGAACCGAGUCGG* |
| | | GGUUC | | mU*mU*mC |
| Nx- | 473 | N₃NₓGUUUUAGAGCUAGAAAUAGCAAGUUAAAA | 573 | (mN*)₃NₓGUUUUAGAGCUAGAAAUAGCAAGUUAAAAU |
| G015703 | | UAAGGCUAGUCCGUUAUCAACUUGGCACCGAGU | | AAGGCUAGUCCGUUAUCAACUUGGCACCGAGUCGG* |
| | | CGGUGC | | mU*mG*mC |
| Nx- | 474 | N₃NₓGUUUUAGAGCUAGAAAUAGCAAGUUAAAA | 574 | (mN*)₃NₓGUUUUAGAGCUAGAAAUAGCAAGUUAAAAU |
| G015704 | | UAAGGCUAGUCCGUUAUCAACUUGGCACCGAGU | | AAGGCUAGUCCGUUAUCAACUUGGCACCGAGUCGG* |
| | | CGGUGC | | mU*mG*mC |
| Nx- | 475 | N₃NₓGUUUUAGAGCUAGAAAUAGCAAGUUAAAA | 575 | (mN*)₃NₓGUUUUAGAGCUAGAAAUAGCAAGUUAAAAU |
| G015705 | | UAAGGCUAGUCCGUUAUCAACUUGGCACCGAGU | | AAGGCUAGUCCGUUAUCAACUUGGCACCGAGUCGG* |
| | | CGGUGC | | mU*mG*mC |
| Nx- | 476 | N₃NₓGUUUUAGAGCUAGAAAUAGCAAGUUAAAA | 576 | (mN*)₃NₓGUUUUAGAGCUAGAAAUAGCAAGUUAAAAU |
| G015706 | | UAAGGCUAGUCCGUUAUCAACUUGGCACCGAGU | | AAGGCUAGUCCGUUAUCAACUUGGCACCGAGUCGG* |
| | | CGGUGC | | mU*mG*mC |
| Nx- | 477 | N₃NₓGUUUUAGAGCUAGAAAUAGCAAGUUAAAA | 577 | (mN*)₃NₓGUUUUAGAGCUAGAAAUAGCAAGUUAAAAU |
| G015707 | | UAAGGCUAGUCCGUUAUCAACUUGGCACCGAGU | | AAGGCUAGUCCGUUAUCAACUUGGCACCGAGUCGG* |
| | | CGGUGC | | mU*mG*mC |
| Nx- | 478 | N₃NₓGUUUUAGAGCUAGAAAUAGCAAGUUAAAA | 578 | (mN*)₃NₓGUUUUAGAGCUAGAAAUAGCAAGUUAAAAU |
| G015708 | | UAAGGCUAGUCCGUUAUCAACUUGGCACCGAGU | | AAGGCUAGUCCGUUAUCAACUUGGCACCGAGUCGG* |
| | | CGGUGC | | mU*mG*mC |
| Nx- | 479 | N₃NₓGUUUUAGAGCUAGAAAUAGCAAGUUAAAA | 579 | (mN*)₃NₓGUUUUAGAGCUAGAAAUAGCAAGUUAAAAU |
| G015709 | | UAAGGCUAGUCCGUUAUCAACUUGGCACCGAGU | | AAGGCUAGUCCGUUAUCAACUUGGCACCGAGUCGG* |
| | | CGGUGC | | mU*mG*mC |
| Nx- | 480 | N₃NₓGUUUUAGAGCUAGAAAUAGCAAGUUAAAA | 580 | (mN*)₃NₓGUUUUAGAGCUAGAAAUAGCAAGUUAAAAU |
| G017275 | | UAAGGCUAGUCCGUUAUCAACUUGGCACCGAGU | | AAGGCUAGUCCGUUAUCAACUUGGCACCGAGUCGG* |
| | | CGGUGC | | mU*mG*mC |
| Nx- | 481 | N₃NₓGUUUUAGAGCUAGAAAUAGCAAGUUAAAA | 581 | (mN*)₃NₓGUUUUAGAmGmCmUmAmGmAmAmAmUmAm |
| G017276 | | UAAGGCUAGUCCGUUAUCACGAAAGGGCACCGA | | GmCAAGUUAAAAUAAGGCUAGUCCGUUAUCACGAAA |
| | | GUCGGUGC | | GGGCACCGAGUCGG*mU*mG*mC |
| Nx- | 482 | N₃NₓGUUUUAGAGCUAGAAAUAGCAAGUUAAAA | 582 | (mN*)NₓGUUUUAGAmGmCmUmAmGmAmAmAmUmAm |
| G017277 | | UAAGGCUAGUCCGUUAUCAAAAAUGGCACCGAG | | GmCAAGUUAAAAUAAGGCUAGUCCGUUAUCAAAAAU |
| | | UCGGUGC | | GGCACCGAGUCGG*mU*mG*mC |
| Nx- | 483 | N₃NₓGUUUUAGAGCUAGAAAUAGCAAGUUAAAA | 583 | (mN*)NₓGUUUUAGAmGmCmUmAmGmAmAmAmUmAm |
| G017278 | | UAAGGCUAGUCCGUUAUCACAAGGGCACCGAGU | | GmCAAGUUAAAAUAAGGCUAGUCCGUUAUCACAAGG |
| | | CGGUGC | | GCACCGAGUCGG*mU*mG*mC |
| Nx- | 484 | N₃NₓGUUUUAGAGCUAGAAAUAGCAAGUUAAAA | 584 | (mN*)₃NₓGUUUUAGAmGmCmUmAmGmAmAmAmUmAm |
| G017279 | | UAAGGCUAGUCCGUUAUCAAAAUGGCACCGAGU | | GmCAAGUUAAAAUAAGGCUAGUCCGUUAUCAAAAUG |
| | | CGGUGC | | GCACCGAGUCGG*mU*mG*mC |
| Nx- | 485 | N₃NₓGUUUUAGAGCGCGAAGCGCAAGUUAAAAU | 585 | (mN*)₃NₓGUUUUAGAGCGCGAAGCGCAAGUUAAAAUA |
| G017280 | | AAGGCUAGUCCGUUAUCAAAAUGGCACCGAGUC | | AGGCUAGUCCGUUAUCAAAAUGGCACCGAGUCGG*m |
| | | GGUGC | | U*mG*mC |
| Nx- | 486 | N₃NₓGUUUUAGAGCUGAAAAGCAAGUUAAAAUA | 586 | (mN*)₃NₓGUUUUAGAGCUGAAAAGCAAGUUAAAAUAA |
| G017281 | | AGGCUAGUCCGUUAUCAAAAUGGCACCGAGUCG | | GGCUAGUCCGUUAUCAAAAUGGCACCGAGUCGG*mU* |
| | | GUGC | | mG*mC |
| Nx- | 487 | N₃NₓGUUUUAGAGCGAAAGCAAGUUAAAAUAAG | 587 | (mN*)₃NₓGUUUUAGAGCGAAAGCAAGUUAAAAUAAGG |
| G017282 | | GCUAGUCCGUUAUCAAAAUGGCACCGAGUCGGU | | CUAGUCCGUUAUCAAAAUGGCACCGAGUCGG*mU*m |
| | | GC | | G*mC |
| Nx- | 488 | N₃NₓGUUUUAGAGCAAAGCAAGUUAAAAUAAGG | 588 | (mN*)₃NₓGUUUUAGAGCAAAGCAAGUUAAAAUAAGGC |
| G017283 | | CUAGUCCGUUAUCAAAAUGGCACCGAGUCGGUG | | UAGUCCGUUAUCAAAAUGGCACCGAGUCGG*mU*mG* |
| | | C | | mC |
| Nx- | 489 | N₃NₓGUUUUAGAGCGAAAGCAAGUUAAAAUAAG | 589 | (mN*)₃NₓGUUUUAGAmGmCmGmAmAmAmGmCAAGUU |
| G013773 | | GCUAGUCCGUUAUCAACUUGGCACCGAGUCGGU | | AAAAUAAGGCUAGUCCGUUAUCAACUUGGCACCGAG |
| | | GC | | UCGG*mU*mG*mC |
| Nx- | 490 | N₃NₓGUUUUAGAGCGAAAGCAAGUUAAAAUAAG | 590 | (mN*)₃NₓGUUUUAGAmGmCmGmAmAmAmGmCAAGUU |
| G013776 | | GCUAGUCCGUUAUCAAGAAAUGGCACCGAGUCG | | AAAAUAAGGCUAGUCCGUUAUCAAGAAAUGGCACCG |
| | | GUGC | | AGUCGG*mU*mG*mC |
| Nx-SM07- | 491 | N₃NₓGUUUUAGAGCUAGAAAUAGCAAGUUAAAA | 591 | (mN*)₃NₓGUUUUAGAmGmCmUmAmGmAmAmAmUmAm |
| 6 | | UAAGGCUAGUCCGUUAUCACGAAAGGGCACCGA | | GmCAAGUUAAAAUAAGGCUAGUCCGUUAUCAmCmGm |
| | | GUCGGUGC | | AmAmAmGmGmGmCmAmCmCmGmAmGmUmCmGmG*m |
| | | | | U*mG*mC |
| Nx-SM12- | 492 | N₃NₓGUUUUAGAGCUAGAAAUAGCAAGUUAAAA | 592 | (mN*)₃NₓGUUUUAGAmGmCmUmAmGmAmAmAmUmAm |
| 6 | | UAAGGCUAGUCCGUUAUCAAAAUGGCACCGAGU | | GmCAAGUUAAAAUAAGGCUAGUCCGUUAUCAmAmA |
| | | CGGUGC | | mAmUmGmGmCmAmCmCmGmAmGmUmCmGmG*mU*m |
| | | | | G*mC |
| Nx-SM07- | 493 | N₃NₓGUUUUAGAGCUAGAAAUAGCAAGUUAAAA | 593 | (mN*)NₓGUUUUAGAmGmCmUmAmGmAmAmAmUmAm |
| 50 | | UAAGGCUAGUCCGUUAUCACGAAAGGGCACCGA | | GmCAAGUUAAAAUAAGGCUAGUCCGUUAUCACmGmA |
| | | GUCGGUGC | | mAmAmGmGmGmCmAmCmCmGmAmGmUmCmGmG*mU |
| | | | | *mG*mC |
| Nx-SM12- | 494 | N₃NₓGUUUUAGAGCUAGAAAUAGCAAGUUAAAA | 594 | (mN*)₃NₓGUUUUAGAmGmCmUmAmGmAmAmAmUmAm |
| 50 | | UAAGGCUAGUCCGUUAUCAAAAUGGCACCGAGU | | GmCAAGUUAAAAUAAGGCUAGUCCGUUAUCAAmAmA |
| | | CGGUGC | | mUmGmGmCmAmCmCmGmAmGmUmCmGmG*mU*mG* |
| | | | | mC |
| | 495- | Not Used | 595- | Not Used |
| | 500 | | 600 | |
| N20- | 601 | N₂₀GUUUUAGAGCUAGAAAUAGCAAGUUAAAAU | 701 | (mN*)₃N₁₇GUUUUAGAGCUAGAAAUAGCAAGUUAAAA |
| G015631 | | AAGGCUAGUCCGUUAUCAACUAAGCACCGAGUC | | UAAGGCUAGUCCGUUAUCAACUAAGCACCGAGUCGG |
| | | GGUGC | | *mU*mG*mC |
| N20- | 602 | N₂₀GUUUUAGAGCUAGAAAUAGCAAGUUAAAAU | 702 | (mN*)₃N₁₇GUUUUAGAGCUAGAAAUAGCAAGUUAAAA |
| G015632 | | AAGGCUAGUCCGUUAUCAACUCAGCACCGAGUC | | UAAGGCUAGUCCGUUAUCAACUCAGCACCGAGUCGG |
| | | GGUGC | | *mU*mG*mC |
| N20- | 603 | N₂₀GUUUUAGAGCUAGAAAUAGCAAGUUAAAAU | 703 | (mN*)₃N₁₇GUUUUAGAGCUAGAAAUAGCAAGUUAAAA |
| G015633 | | AAGGCUAGUCCGUUAUCCACUUGGCACCGAGUC | | UAAGGCUAGUCCGUUAUCCACUUGGCACCGAGUCGG |
| | | GGUGC | | *mU*mG*mC |
| N20- | 604 | N₂₀GUUUUAGAGCUAGAAAUAGCAAGUUAAAAU | 704 | (mN*)₃N₁₇GUUUUAGAGCUAGAAAUAGCAAGUUAAAA |
| G015634 | | ACGGCUAGUCCGUUAUCAACUUGGCACCGAGUC | | UACGGCUAGUCCGUUAUCAACUUGGCACCGAGUCGG |
| | | GGUGC | | *mU*mG*mC |
| N20- | 605 | N₂₀GUUUUAGAGCUAGAAAUAGCAAGUUAAAAU | 705 | (mN*)₃N₁₇GUUUUAGAGCUAGAAAUAGCAAGUUAAAA |
| G015635 | | AAGGCUAGUCCGUUAUCAAGAGCUGGCACCGAG | | UAAGGCUAGUCCGUUAUCAAGAGCUGGCACCGAGUC |
| | | UCGGUGC | | GG*mU*mG*mC |
| N20- | 606 | N₂₀GUUUUAGAGCUAGAAAUAGCAAGUUAAAAU | 706 | (mN*)₃N₁₇GUUUUAGAGCUAGAAAUAGCAAGUUAAAA |
| G015636 | | AAGGCUAGUCCGUUAUCAAGAAAUGGCACCGAG | | UAAGGCUAGUCCGUUAUCAAGAAAUGGCACCGAGUC |
| | | UCGGUGC | | GG*mU*mG*mC |
| N20- | 607 | N₂₀GUUUUAGAGCUAGAAAUAGCAAGUUAAAAU | 707 | (mN*)₃N₁₇GUUUUAGAGCUAGAAAUAGCAAGUUAAAA |
| G015637 | | AAGGCUAGUCCGUUAUCACGAAAGGGCACCGAG | | UAAGGCUAGUCCGUUAUCACGAAAGGGCACCGAGUC |
| | | UCGGUGC | | GG*mU*mG*mC |
| N20- | 608 | N₂₀GUUUUAGAGCUAGAAAUAGCAAGUUAAAAU | 708 | (mN*)₃N₁₇GUUUUAGAGCUAGAAAUAGCAAGUUAAAA |
| G015638 | | AAGGCUAGUCCGUUAUCAAAAAUGGCACCGAGU | | UAAGGCUAGUCCGUUAUCAAAAAUGGCACCGAGUCG |
| | | CGGUGC | | G*mU*mG*mC |
| N20- | 609 | N₂₀GUUUUAGAGCUAGAAAUAGCAAGUUAAAAU | 709 | (mN*)₃N₁₇GUUUUAGAGCUAGAAAUAGCAAGUUAAAA |
| G015639 | | AAGGCUAGUCCGUUAUCAAAAGUGGCACCGAGU | | UAAGGCUAGUCCGUUAUCAAAAGUGGCACCGAGUCG |
| | | CGGUGC | | G*mU*mG*mC |
| N20- | 610 | N₂₀GUUUUAGAGCUAGAAAUAGCAAGUUAAAAU | 710 | (mN*)₃N₁₇GUUUUAGAGCUAGAAAUAGCAAGUUAAAA |
| G015640 | | AAGGCUAGUCCGUUAUCAACAGUGGCACCGAGU | | UAAGGCUAGUCCGUUAUCAACAGUGGCACCGAGUCG |
| | | CGGUGC | | G*mU*mG*mC |
| N20- | 611 | N₂₀GUUUUAGAGCUAGAAAUAGCAAGUUAAAAU | 711 | (mN*)₃N₁₇GUUUUAGAGCUAGAAAUAGCAAGUUAAAA |
| G015641 | | AAGGCUAGUCCGUUAUCACAAGGGCACCGAGUC | | UAAGGCUAGUCCGUUAUCACAAGGGCACCGAGUCGG |
| | | GGUGC | | *mU*mG*mC |
| N20- | 612 | N₂₀GUUUUAGAGCUAGAAAUAGCAAGUUAAAAU | 712 | (mN*)₃N₁₇GUUUUAGAGCUAGAAAUAGCAAGUUAAAA |
| G015642 | | AAGGCUAGUCCGUUAUCAAAAUGGCACCGAGUC | | UAAGGCUAGUCCGUUAUCAAAAUGGCACCGAGUCGG |
| | | GGUGC | | *mU*mG*mC |
| N20- | 613 | N₂₀GUUUUAGAGCUAGAAAUAGCAAGUUAAAAU | 713 | (mN*)₃N₁₇GUUUUAGAGCUAGAAAUAGCAAGUUAAAA |
| G015643 | | AAGGCUAGUCCGUUAUCAAAGGCACCGAGUCGG | | UAAGGCUAGUCCGUUAUCAAAGGCACCGAGUCGG*m |
| | | UGC | | U*mG*mC |
| N20- | 614 | N₂₀GUUUUAGAGCUAGAAAUAGCAAGUUAAAAU | 714 | (mN*)₃N₁₇GUUUUAGAGCUAGAAAUAGCAAGUUAAAA |
| G015644 | | AAGGCUAGUCCGUUAUCAAGGGCACCGAGUCGG | | UAAGGCUAGUCCGUUAUCAAGGGCACCGAGUCGG*m |
| | | UGC | | U*mG*mC |
| N20- | 615 | N₂₀GUUUUAGAGCUAGAAAUAGCAAGUUAAAAU | 715 | (mN*)₃N₁₇GUUUUAGAGCUAGAAAUAGCAAGUUAAAA |
| G015645 | | AAGGCUAGUCCGUUAUCAGGCACCGAGUCGGUG | | UAAGGCUAGUCCGUUAUCAGGCACCGAGUCGG*mU* |
| | | C | | mG*mC |
| N20- | 616 | N₂₀GUUUUAGAGCUAGAAUAGCAAGUUAAAAUA | 716 | (mN*)₃N₁₇GUUUUAGAGCUAGAAUAGCAAGUUAAAAU |
| G015646 | | AGGCUAGUCCGUUAUCAACUUGGCACCGAGUCG | | AAGGCUAGUCCGUUAUCAACUUGGCACCGAGUCGG* |
| | | GUGC | | mU*mG*mC |
| N20- | 617 | N₂₀GUUUUAGAGCGCAAAGCGCAAGUUAAAAUA | 717 | (mN*)₃N₁₇GUUUUAGAGCGCAAAGCGCAAGUUAAAAUA |
| G015647 | | AGGCUAGUCCGUUAUCAACUUGGCACCGAGUCG | | AGGCUAGUCCGUUAUCAACUUGGCACCGAGUCGG*m |
| | | GUGC | | U*mG*mC |
| N20- | 618 | N₂₀GUUUUAGAGCGCGAAGCGCAAGUUAAAAUA | 718 | (mN*)₃N₁₇GUUUUAGAGCGCGAAGCGCAAGUUAAAAUA |
| G015648 | | AGGCUAGUCCGUUAUCAACUUGGCACCGAGUCG | | AGGCUAGUCCGUUAUCAACUUGGCACCGAGUCGG*m |
| | | GUGC | | U*mG*mC |
| N20- | 619 | N₂₀GUUUUAGAGCGGAAACGCAAGUUAAAAUAA | 719 | (mN*)₃N₁₇GUUUUAGAGCGGAAACGCAAGUUAAAAUAA |
| G015649 | | GGCUAGUCCGUUAUCAACUUGGCACCGAGUCGG | | GGCUAGUCCGUUAUCAACUUGGCACCGAGUCGGU*m |
| | | UGCU | | G*mC*mU |
| N20- | 620 | N₂₀GUUUUAGAGCGGAAACGCAAGUUAAAAUAA | 720 | (mN*)₃N₁₇GUUUUAGAGCGGAAACGCAAGUUAAAAUAA |
| G015650 | | GGCUAGUCCGUUAUCAACUUGGCACCGAGUCGG | | GGCUAGUCCGUUAUCAACUUGGCACCGAGUCGG*mU* |
| | | UGC | | mG*mC |
| N20- | 621 | N₂₀GUUUUAGAGCCGAAAGGCAAGUUAAAAUAA | 721 | (mN*)₃N₁₇GUUUUAGAGCCGAAAGGCAAGUUAAAAUAA |
| G015651 | | GGCUAGUCCGUUAUCAACUUGGCACCGAGUCGG | | GGCUAGUCCGUUAUCAACUUGGCACCGAGUCGG*mU* |
| | | UGC | | mG*mC |
| N20- | 622 | N₂₀GUUUUAGAGCUGAAAAGCAAGUUAAAAUAA | 722 | (mN*)₃N₁₇GUUUUAGAGCUGAAAAGCAAGUUAAAAUA |
| G015652 | | GGCUAGUCCGUUAUCAACUUGGCACCGAGUCGG | | AGGCUAGUCCGUUAUCAACUUGGCACCGAGUCGG*m |
| | | UGC | | U*mG*mC |
| N20- | 623 | N₂₀GUUUUAGAGCGAAAGCAAGUUAAAAUAAGG | 723 | (mN*)₃N₁₇GUUUUAGAGCGAAAGCAAGUUAAAAUAAG |
| G015653 | | CUAGUCCGUUAUCAACUUGGCACCGAGUCGGUG | | GCUAGUCCGUUAUCAACUUGGCACCGAGUCGG*mU*m |
| | | C | | G*mC |
| N20- | 624 | N₂₀GUUUUAGAGCGAAGCAAGUUAAAAUAAGGC | 724 | (mN*)₃N₁₇GUUUUAGAGCGAAGCAAGUUAAAAUAAGGC |
| G015654 | | UAGUCCGUUAUCAACUUGGCACCGAGUCGGUGC | | UAGUCCGUUAUCAACUUGGCACCGAGUCGG*mU*mG* |
| | | | | mC |
| N20- | 625 | N₂₀GUUUUAGAGCAAAGCAAGUUAAAAUAAGGC | 725 | (mN*)₃N₁₇GUUUUAGAGCAAAGCAAGUUAAAAUAAGGC |
| G015655 | | UAGUCCGUUAUCAACUUGGCACCGAGUCGGUGC | | UAGUCCGUUAUCAACUUGGCACCGAGUCGG*mU*mG* |
| | | | | mC |
| N20- | 626 | N₂₀GUUUUAGAGGAAACAAGUUAAAAUAAGGCU | 726 | (mN*)₃N₁₇GUUUUAGAGGAAACAAGUUAAAAUAAGGC |
| G015656 | | AGUCCGUUAUCAACUUGGCACCGAGUCGGUGC | | UAGUCCGUUAUCAACUUGGCACCGAGUCGG*mU*mG* |
| | | | | mC |
| N20- | 627 | N₂₀GUUUUAGAGCAAGCAAGUUAAAAUAAGGCU | 727 | (mN*)₃N₁₇GUUUUAGAGCAAGCAAGUUAAAAUAAGGCU |
| G015657 | | AGUCCGUUAUCAACUUGGCACCGAGUCGGUGC | | AGUCCGUUAUCAACUUGGCACCGAGUCGG*mU*mG*m |
| | | | | C |
| N20- | 628 | N₂₀GUUUUAGAGCGAGCAAGUUAAAAUAAGGCU | 728 | (mN*)₃N₁₇GUUUUAGAGCGAGCAAGUUAAAAUAAGGCU |
| G015658 | | AGUCCGUUAUCAACUUGGCACCGAGUCGGUGC | | AGUCCGUUAUCAACUUGGCACCGAGUCGG*mU*mG*m |
| | | | | C |
| N20- | 629 | N₂₀GUUUUAGAGCGCAAGUUAAAAUAAGGCUAG | 729 | (mN*)₃N₁₇GUUUUAGAGCGCAAGUUAAAAUAAGGCUAG |
| G015659 | | UCCGUUAUCAACUUGGCACCGAGUCGGUGC | | UCCGUUAUCAACUUGGCACCGAGUCGG*mU*mG*mC |
| N20- | 630 | N₂₀GUUUUAGAGAACAAGUUAAAAUAAGGCUAG | 730 | (mN*)₃N₁₇GUUUUAGAGAACAAGUUAAAAUAAGGCUA |
| G015660 | | UCCGUUAUCAACUUGGCACCGAGUCGGUGC | | GUCCGUUAUCAACUUGGCACCGAGUCGG*mU*mG*mC |
| N20- | 631 | N₂₀GUUUUAGAGACAAGUUAAAAUAAGGCUAGU | 731 | (mN*)₃N₁₇GUUUUAGAGACAAGUUAAAAUAAGGCUAG |
| G015661 | | CCGUUAUCAACUUGGCACCGAGUCGGUGC | | UCCGUUAUCAACUUGGCACCGAGUCGG*mU*mG*mC |
| N20- | 632 | N₂₀GUUUUAGAGCAAGUUAAAAUAAGGCUAGUC | 732 | (mN*)₃N₁₇GUUUUAGAGCAAGUUAAAAUAAGGCUAGUC |
| G015662 | | CGUUAUCAACUUGGCACCGAGUCGGUGC | | CGUUAUCAACUUGGCACCGAGUCGG*mU*mG*mC |
| N20- | 633 | N₂₀GUUUUAGAAAAAGUUAAAAUAAGGCUAGUC | 733 | (mN*)₃N₁₇GUUUUAGAAAAAGUUAAAAUAAGGCUAGU |
| G015663 | | CGUUAUCAACUUGGCACCGAGUCGGUGC | | CCGUUAUCAACUUGGCACCGAGUCGG*mU*mG*mC |
| N20- | 634 | N₂₀GUUUUAGAAAAGUUAAAAUAAGGCUAGUCC | 734 | (mN*)₃N₁₇GUUUUAGAAAAGUUAAAAUAAGGCUAGUCC |
| G015664 | | GUUAUCAACUUGGCACCGAGUCGGUGC | | GUUAUCAACUUGGCACCGAGUCGG*mU*mG*mC |
| N20- | 635 | N₂₀GUUUUAGAGCUAGAAAUAGCAAGUUAAAAU | 735 | (mN*)₃N₁₇GUUUUAGAGCUAGAAAUAGCAAGUUAAAA |
| G015665 | | AAGGCUAGUCCGUUAUCAACUUGGCACCGAGUC | | UAAGGCUAGUCCGUUAUCAACUUGGCACCGAGUCG* |
| | | GGUG | | mG*mU*mG |
| N20- | 636 | N₂₀GUUUUAGAGCUAGAAAUAGCAAGUUAAAAU | 736 | (mN*)₃N₁₇GUUUUAGAGCUAGAAAUAGCAAGUUAAAA |
| G015666 | | AAGGCUAGUCCGUUAUCAACUUGGCACCGAGUC | | UAAGGCUAGUCCGUUAUCAACUUGGCACCGAGUC*m |
| | | GGU | | G*mG*mU |
| N20- | 637 | N₂₀GUUUUAGAGCUAGAAAUAGCAAGUUAAAAU | 737 | (mN*)₃N₁₇GUUUUAGAGCUAGAAAUAGCAAGUUAAAA |
| G015667 | | AAGGCUAGUCCGUUAUCAACUUGGCACCGAGUC | | UAAGGCUAGUCCGUUAUCAACUUGGCACCGAGU*mC* |
| | | GG | | mG*mG |
| N20- | 638 | N₂₀GUUUUAGAGCUAGAAAUAGCAAGUUAAAAU | 738 | (mN*)₃N₁₇GUUUUAGAGCUAGAAAUAGCAAGUUAAAA |
| G015668 | | AAGGCUAGUCCGUUAUCAACUUGGCACCGAGUC | | UAAGGCUAGUCCGUUAUCAACUUGGCACCGAG*mU* |
| | | G | | mC*mG |
| N20- | 639 | N₂₀GUUUUAGAGCUAGAAAUAGCAAGUUAAAAU | 739 | (mN*)₃N₁₇GUUUUAGAGCUAGAAAUAGCAAGUUAAAA |
| G015669 | | AAGGCUAGUCCGUUAUCAACUUGGCACCGAGUC | | UAAGGCUAGUCCGUUAUCAACUUGGCACCGA*mG*m |
| | | | | U*mC |
| N20- | 640 | N₂₀GUUUUAGAGCUAGAAAUAGCAAGUUAAAAU | 740 | (mN*)₃N₁₇GUUUUAGAGCUAGAAAUAGCAAGUUAAAA |
| G015670 | | AAGGCUAGUCCGUUAUCAACUUGGCACCGAGU | | UAAGGCUAGUCCGUUAUCAACUUGGCACCG*mA*mG* |
| | | | | mU |
| N20- | 641 | N₂₀GUUUUAGAGCGAAAGCAAGUUAAAAUAAGG | 741 | (mN*)₃N₁₇GUUUUAGAGCGAAAGCAAGUUAAAAUAAG |
| G015671 | | CUAGUCCGUUAUCACUGGCACCGAGUCGGUGC | | GCUAGUCCGUUAUCACUGGCACCGAGUCGG*mU*mG* |
| | | | | mC |
| N20- | 642 | N₂₀GUUUUAGAGCGAAAGCAAGUUAAAAUAAGG | 742 | (mN*)₃N₁₇GUUUUAGAGCGAAAGCAAGUUAAAAUAAG |
| G015672 | | CUAGUCCGUUAUCAGGCACCGAGUCGGUGC | | GCUAGUCCGUUAUCAGGCACCGAGUCGG*mU*mG*mC |
| N20- | 643 | N₂₀GUUUUAGAGAAAAAGUUAAAAUAAGGCUAG | 743 | (mN*)₃N₁₇GUUUUAGAGAAAAAGUUAAAAUAAGGCUA |
| G015673 | | UCCGUUAUCAACUUGGCACCGAGUCGGUGC | | GUCCGUUAUCAACUUGGCACCGAGUCGG*mU*mG*mC |
| N20- | 644 | N₂₀GUUUUAGAGGAAACAAGUUAAAAUAAGGCU | 744 | (mN*)₃N₁₇GUUUUAGAGGAAACAAGUUAAAAUAAGGC |
| G015674 | | AGUCCGUUAUCAAUGGCACCGAGUCGGUGC | | UAGUCCGUUAUCAAUGGCACCGAGUCGG*mU*mG*mC |
| N20- | 645 | N₂₀GUUUUAGAGAAAAAGUUAAAAUAAGGCUAG | 745 | (mN*)₃N₁₇GUUUUAGAGAAAAAGUUAAAAUAAGGCUA |
| G015675 | | UCCGUUAUCAAUGGCACCGAGUCGGUGC | | GUCCGUUAUCAAUGGCACCGAGUCGG*mU*mG*mC |
| N20- | 646 | N₂₀GUUUUAGAGGAAACAAGUUAAAAUAAGGCU | 746 | (mN*)₃N₁₇GUUUUAGAGGAAACAAGUUAAAAUAAGGC |
| G015676 | | AGUCCGUUAUCACUGGCACCGAGUCGGUGC | | UAGUCCGUUAUCACUGGCACCGAGUCGG*mU*mG*mC |
| N20- | 647 | N₂₀GUUUUAGAGAAAAAGUUAAAAUAAGGCUAG | 747 | (mN*)₃N₁₇GUUUUAGAGAAAAAGUUAAAAUAAGGCUA |
| G015677 | | UCCGUUAUCAGGCACCGAGUCGGUGC | | GUCCGUUAUCAGGCACCGAGUCGG*mU*mG*mC |
| N20- | 648 | N₂₀GUUUUAGAGCGAAAGCAAGUUAAAAUAAGG | 748 | (mN*)₃N₁₇GUUUUAGAGCGAAAGCAAGUUAAAAUAAG |
| G015678 | | CUAGUCCGUUAUCAAGCUAUGGCACCGAGUCGG | | GCUAGUCCGUUAUCAAGCUAUGGCACCGAGUCGG*m |
| | | UGC | | U*mG*mC |
| N20- | 649 | N₂₀GUUUUAGAGCUAGAAAUAGCAAGUUAAAAU | 749 | (mN*)₃N₁₇GUUUUAGAGCUAGAAAUAGCAAGUUAAAA |
| G015679 | | AAGGCAGUCCGUUAUCAACUUGGCACCGAGUCG | | UAAGGCAGUCCGUUAUCAACUUGGCACCGAGUCGG* |
| | | GUGC | | mU*mG*mC |
| N20- | 650 | N₂₀GUUUUAGAGCUAGAAAUAGCAAGUUAAAAU | 750 | (mN*)₃N₁₇GUUUUAGAGCUAGAAAUAGCAAGUUAAAA |
| G015680 | | AAGGCUGUCCGUUAUCAACUUGGCACCGAGUCG | | UAAGGCUGUCCGUUAUCAACUUGGCACCGAGUCGG* |
| | | GUGC | | mU*mG*mC |
| N20- | 651 | N₂₀GUUUUAGAGCUAGAAAUAGCAAGUUAAAAU | 751 | (mN*)₃N₁₇GUUUUAGAGCUAGAAAUAGCAAGUUAAAA |
| G015681 | | AAGGCGUCCGUUAUCAACUUGGCACCGAGUCGG | | UAAGGCGUCCGUUAUCAACUUGGCACCGAGUCGG*m |
| | | UGC | | U*mG*mC |
| N20- | 652 | N₂₀GUUUUAGAGCUAGAAAUAGCAAGUUAAAAU | 752 | (mN*)₃N₁₇GUUUUAGAGCUAGAAAUAGCAAGUUAAAA |
| G015682 | | AAGGUAUCCGUUAUCAACUUGGCACCGAGUCGG | | UAAGGUAUCCGUUAUCAACUUGGCACCGAGUCGG*m |
| | | UGC | | U*mG*mC |
| N20- | 653 | N₂₀GUUUUAGAGCUAGAAAUAGCAAGUUAAAAU | 753 | (mN*)₃N₁₇GUUUUAGAGCUAGAAAUAGCAAGUUAAAA |
| G015683 | | AAGGUUCCGUUAUCAACUUGGCACCGAGUCGGU | | UAAGGUUCCGUUAUCAACUUGGCACCGAGUCGG*mU* |
| | | GC | | mG*mC |
| N20- | 654 | N₂₀GUUUUAGAGCUAGAAAUAGCAAGUUAAAAU | 754 | (mN*)₃N₁₇GUUUUAGAGCUAGAAAUAGCAAGUUAAAA |
| G015684 | | AAGGAUCCGUUAUCAACUUGGCACCGAGUCGGU | | UAAGGAUCCGUUAUCAACUUGGCACCGAGUCGG*mU* |
| | | GC | | mG*mC |
| N20- | 655 | N₂₀GUUUUCGAGCUAGAAAUAGCAAGUGAAAAU | 755 | (mN*)₃N₁₇GUUUUCGAGCUAGAAAUAGCAAGUGAAAAU |
| G015685 | | AAGGCUAGUCCGUUAUCAACUUGGCACCGAGUC | | AAGGCUAGUCCGUUAUCAACUUGGCACCGAGUCGG* |
| | | GGUGC | | mU*mG*mC |
| N20- | 656 | N₂₀GUUUUUGAGCUAGAAAUAGCAAGUAAAAAU | 756 | (mN*)₃N₁₇GUUUUUGAGCUAGAAAUAGCAAGUAAAAA |
| G015686 | | AAGGCUAGUCCGUUAUCAACUUGGCACCGAGUC | | UAAGGCUAGUCCGUUAUCAACUUGGCACCGAGUCGG |
| | | GGUGC | | *mU*mG*mC |
| N20- | 657 | N₂₀GUUUUAGAGCGAGAAAUCGCAAGUUAAAAU | 757 | (mN*)₃N₁₇GUUUUAGAGCGAGAAAUCGCAAGUUAAAAU |
| G015687 | | AAGGCUAGUCCGUUAUCAACUUGGCACCGAGUC | | AAGGCUAGUCCGUUAUCAACUUGGCACCGAGUCGG* |
| | | GGUGC | | mU*mG*mC |
| N20- | 658 | N₂₀GUUUUAGAGCUAGAAAUAGCGAGUUAAAAU | 758 | (mN*)₃N₁₇GUUUUAGAGCUAGAAAUAGCGAGUUAAAA |
| G015688 | | AAGGCUAGUCCGUUAUCAACUUGGCACCGAGUC | | UAAGGCUAGUCCGUUAUCAACUUGGCACCGAGUCGG |
| | | GGUGC | | *mU*mG*mC |
| N20- | 659 | N₂₀GUUUUAGAGCUAGAAAUAGCCGGUUAAAAU | 759 | (mN*)₃N₁₇GUUUUAGAGCUAGAAAUAGCCGGUUAAAAU |
| G015689 | | AAGGCUAGUCCGUUAUCAACUUGGCACCGAGUC | | AAGGCUAGUCCGUUAUCAACUUGGCACCGAGUCGG* |
| | | GGUGC | | mU*mG*mC |
| N20- | 660 | N₂₀GUUUUAGAGCUAGAAAUAGCAAGUUAAAAU | 760 | (mN*)₃N₁₇GUUUUAGAGCUAGAAAUAGCAAGUUAAAA |
| G015690 | | GAGGCUAGUCCGUUAUCAACUUGGCACCGAGUC | | UGAGGCUAGUCCGUUAUCAACUUGGCACCGAGUCGG |
| | | GGUGC | | *mU*mG*mC |
| N20- | 661 | N₂₀GUUUUAGAGCUAGAAAUAGCAAGUUAAAAU | 761 | (mN*)₃N₁₇GUUUUAGAGCUAGAAAUAGCAAGUUAAAA |
| G015691 | | AAGGCUGGUCCGUUAUCAACUUGGCACCGAGUC | | UAAGGCUGGUCCGUUAUCAACUUGGCACCGAGUCGG |
| | | GGUGC | | *mU*mG*mC |
| N20- | 662 | N₂₀GUUUUAGAGCUAGAAAUAGCAAGUUAAAAU | 762 | (mN*)₃N₁₇GUUUUAGAGCUAGAAAUAGCAAGUUAAAA |
| G015692 | | AAGGCUCGUCCGUUAUCAACUUGGCACCGAGUC | | UAAGGCUCGUCCGUUAUCAACUUGGCACCGAGUCGG |
| | | GGUGC | | *mU*mG*mC |
| N20- | 663 | N₂₀GUUUUAGAGCUAGAAAUAGCAAGUUAAAAU | 763 | (mN*)₃N₁₇GUUUUAGAGCUAGAAAUAGCAAGUUAAAA |
| G015693 | | AAGGCUUGUCCGUUAUCAACUUGGCACCGAGUC | | UAAGGCUUGUCCGUUAUCAACUUGGCACCGAGUCGG |
| | | GGUGC | | *mU*mG*mC |
| N20- | 664 | N₂₀GUUUUAGAGCUAGAAAUAGCAAGUUAAAAU | 764 | (mN*)₃N₁₇GUUUUAGAGCUAGAAAUAGCAAGUUAAAA |
| G015694 | | AAGGCUAGUCCGUUGUCAACUUGGCACCGAGUC | | UAAGGCUAGUCCGUUGUCAACUUGGCACCGAGUCGG |
| | | GGUGC | | *mU*mG*mC |
| N20- | 665 | N₂₀GUUUUAGAGCUAGAAAUAGCAAGUUAAAAU | 765 | (mN*)₃N₁₇GUUUUAGAGCUAGAAAUAGCAAGUUAAAA |
| G015695 | | AAGGCUAGUCCGUUCUCAACUUGGCACCGAGUC | | UAAGGCUAGUCCGUUCUCAACUUGGCACCGAGUCGG |
| | | GGUGC | | *mU*mG*mC |
| N20- | 666 | N₂₀GUUUUAGAGCUAGAAAUAGCAAGUUAAAAU | 766 | (mN*)₃N₁₇GUUUUAGAGCUAGAAAUAGCAAGUUAAAA |
| G015696 | | AAGGCUAGUCCGUUUUCAACUUGGCACCGAGUC | | UAAGGCUAGUCCGUUUUCAACUUGGCACCGAGUCGG |
| | | GGUGC | | *mU*mG*mC |
| N20- | 667 | N₂₀GUUUUAGAGCUAGAAAUAGCAAGUUAAAAU | 767 | (mN*)₃N₁₇GUUUUAGAGCUAGAAAUAGCAAGUUAAAA |
| G015697 | | AAGGCUAGUCCGUUAUGAACUUGGCACCGAGUC | | UAAGGCUAGUCCGUUAUGAACUUGGCACCGAGUCGG |
| | | GGUGC | | *mU*mG*mC |
| N20- | 668 | N₂₀GUUUUAGAGCUAGAAAUAGCAAGUUAAAAU | 768 | (mN*)₃N₁₇GUUUUAGAGCUAGAAAUAGCAAGUUAAAA |
| G015698 | | AAGGCUAGUCCGUUAUCAACUUGGGACCGAGUC | | UAAGGCUAGUCCGUUAUCAACUUGGGACCGAGUCGG |
| | | GGUCC | | *mU*mC*mC |
| N20- | 669 | N₂₀GUUUUAGAGCUAGAAAUAGCAAGUUAAAAU | 769 | (mN*)₃N₁₇GUUUUAGAGCUAGAAAUAGCAAGUUAAAA |
| G015699 | | AAGGCUAGUCCGUUAUCAACUUGGAACCGAGUC | | UAAGGCUAGUCCGUUAUCAACUUGGAACCGAGUCGG |
| | | GGUUC | | *mU*mU*mC |
| N20- | 670 | N₂₀GUUUUCGAGCGAGAAAUCGCGAGUGAAAAU | 770 | (mN*)₃N₁₇GUUUUCGAGCGAGAAAUCGCGAGUGAAAAU |
| G015700 | | GAGGCUGGUCCGUUGUGAACUUGGAACCGAGUC | | GAGGCUGGUCCGUUGUGAACUUGGAACCGAGUCGG* |
| | | GGUUC | | mU*mU*mC |
| N20- | 671 | N₂₀GUUUUUGAGCGAGAAAUCGCAAGUAAAAAU | 771 | (mN*)₃N₁₇GUUUUUGAGCGAGAAAUCGCAAGUAAAAAU |
| G015701 | | AAGGCUCGUCCGUUCUGAACUUGGAACCGAGUC | | AAGGCUCGUCCGUUCUGAACUUGGAACCGAGUCGG* |
| | | GGUUC | | mU*mU*mC |
| N20- | 672 | N₂₀GUUUCGGAGCCGGAAACGGCGAGUCGAAAUG | 772 | (mN*)₃N₁₇GUUUCGGAGCCGGAAACGGCGAGUCGAAAU |
| G015702 | | AGGCUGGUCCGUUGUCGGCUCGGAACCGAGUCG | | GAGGCUGGUCCGUUGUCGGCUCGGAACCGAGUCGG* |
| | | GUUC | | mU*mU*mC |
| N20- | 673 | N₂₀GUUUUAGAGCUAGAAAUAGCAAGUUAAAAU | 773 | mC*mU*mC*ACUGAAAAGUGAGUCUGGAGAGCUGCAG |
| G015703 | | AAGGCUAGUCCGUUAUCAACUUGGCACCGAGUC | | UUUUAGAGCUAGAAAUAGCAAGUUAAAAUAAGGCUA |
| | | GGUGC | | GUCCGUUAUCAACUUGGCACCGAGUCGG*mU*mG*mC |
| N20- | 674 | N₂₀GUUUUAGAGCUAGAAAUAGCAAGUUAAAAU | 774 | mC*mA*mC*UGAAAAGUGAGUCUGGAGAGCUGCAGU |
| G015704 | | AAGGCUAGUCCGUUAUCAACUUGGCACCGAGUC | | UUUAGAGCUAGAAAUAGCAAGUUAAAAUAAGGCUAG |
| | | GGUGC | | UCCGUUAUCAACUUGGCACCGAGUCGG*mU*mG*mC |
| N20- | 675 | N₂₀GUUUUAGAGCUAGAAAUAGCAAGUUAAAAU | 775 | mC*mU*mG*AAAAGUGAGUCUGGAGAGCUGCAGUUU |
| G015705 | | AAGGCUAGUCCGUUAUCAACUUGGCACCGAGUC | | UAGAGCUAGAAAUAGCAAGUUAAAAUAAGGCUAGUC |
| | | GGUGC | | CGUUAUCAACUUGGCACCGAGUCGG*mU*mG*mC |
| N20- | 676 | N₂₀GUUUUAGAGCUAGAAAUAGCAAGUUAAAAU | 776 | mU*mC*mU*GGAGAGCUGCAGUUUUAGAGCUAGAAA |
| G015706 | | AAGGCUAGUCCGUUAUCAACUUGGCACCGAGUC | | UAGCAAGUUAAAAUAAGGCUAGUCCGUUAUCAACUU |
| | | GGUGC | | GGCACCGAGUCGG*mU*mG*mC |
| N20- | 677 | N₂₀GUUUUAGAGCUAGAAAUAGCAAGUUAAAAU | 777 | mA*mG*mU*CUGGAGAGCUGCAGUUUUAGAGCUAGA |
| G015707 | | AAGGCUAGUCCGUUAUCAACUUGGCACCGAGUC | | AAUAGCAAGUUAAAAUAAGGCUAGUCCGUUAUCAAC |
| | | GGUGC | | UUGGCACCGAGUCGG*mU*mG*mC |
| N20- | 678 | N₂₀GUUUUAGAGCUAGAAAUAGCAAGUUAAAAU | 778 | mU*mG*mA*GUCUGGAGAGCUGCAGUUUUAGAGCUA |
| G015708 | | AAGGCUAGUCCGUUAUCAACUUGGCACCGAGUC | | GAAAUAGCAAGUUAAAAUAAGGCUAGUCCGUUAUCA |
| | | GGUGC | | ACUUGGCACCGAGUCGG*mU*mG*mC |
| N20- | 679 | N₂₀GUUUUAGAGCUAGAAAUAGCAAGUUAAAAU | 779 | mG*mA*mA*AAGUGAGUCUGGAGAGCUGCAGUUUUA |
| G015709 | | AAGGCUAGUCCGUUAUCAACUUGGCACCGAGUC | | GAGCUAGAAAUAGCAAGUUAAAAUAAGGCUAGUCCG |
| | | GGUGC | | UUAUCAACUUGGCACCGAGUCGG*mU*mG*mC |
| N20- | 680 | N₂₀GUUUUAGAGCUAGAAAUAGCAAGUUAAAAU | 780 | (mN*)₃N₁₇GUUUUAGAGCUAGAAAUAGCAAGUUAAAA |
| G017275 | | AAGGCUAGUCCGUUAUCAACUUGGCACCGAGUC | | UAAGGCUAGUCCGUUAUCAACUUGGCACCGAGUCGG |
| | | GGUGC | | *mU*mG*mC |
| N20- | 681 | N₂₀GUUUUAGAGCUAGAAAUAGCAAGUUAAAAU | 781 | (mN*)N₁₇GUUUUAGAmGmCmUmAmGmAmAmAmUmAm |
| G017276 | | AAGGCUAGUCCGUUAUCACGAAAGGGCACCGAG | | GmCAAGUUAAAAUAAGGCUAGUCCGUUAUCACGAAA |
| | | UCGGUGC | | GGGCACCGAGUCGG*mU*mG*mC |
| N20- | 682 | N₂₀GUUUUAGAGCUAGAAAUAGCAAGUUAAAAU | 782 | (mN*)N₁₇GUUUUAGAmGmCmUmAmGmAmAmAmUmAm |
| G017277 | | AAGGCUAGUCCGUUAUCAAAAAUGGCACCGAGU | | GmCAAGUUAAAAUAAGGCUAGUCCGUUAUCAAAAAU |
| | | CGGUGC | | GGCACCGAGUCGG*mU*mG*mC |
| N20- | 683 | N₂₀GUUUUAGAGCUAGAAAUAGCAAGUUAAAAU | 783 | (mN*)N₁₇GUUUUAGAmGmCmUmAmGmAmAmAmUmAm |
| G017278 | | AAGGCUAGUCCGUUAUCACAAGGGCACCGAGUC | | GmCAAGUUAAAAUAAGGCUAGUCCGUUAUCACAAGG |
| | | GGUGC | | GCACCGAGUCGG*mU*mG*mC |
| N20- | 684 | N₂₀GUUUUAGAGCUAGAAAUAGCAAGUUAAAAU | 784 | (mN*)N₁₇GUUUUAGAmGmCmUmAmGmAmAmAmUmAm |
| G017279 | | AAGGCUAGUCCGUUAUCAAAAUGGCACCGAGUC | | GmCAAGUUAAAAUAAGGCUAGUCCGUUAUCAAAAUG |
| | | GGUGC | | GCACCGAGUCGG*mU*mG*mC |
| N20- | 685 | N₂₀GUUUUAGAGCGCGAAGCGCAAGUUAAAAUA | 785 | (mN*)₃N₁₇GUUUUAGAGCGCGAAGCGCAAGUUAAAAUA |
| G017280 | | AGGCUAGUCCGUUAUCAAAAUGGCACCGAGUCG | | AGGCUAGUCCGUUAUCAAAAUGGCACCGAGUCGG*m |
| | | GUGC | | U*mG*mC |
| N20- | 686 | N₂₀GUUUUAGAGCUGAAAAGCAAGUUAAAAUAA | 786 | (mN*)₃N₁₇GUUUUAGAGCUGAAAAGCAAGUUAAAAUA |
| G017281 | | GGCUAGUCCGUUAUCAAAAUGGCACCGAGUCGG | | AGGCUAGUCCGUUAUCAAAAUGGCACCGAGUCGG*m |
| | | UGC | | U*mG*mC |
| N20- | 687 | N₂₀GUUUUAGAGCGAAAGCAAGUUAAAAUAAGG | 787 | (mN*)₃N₁₇GUUUUAGAGCGAAAGCAAGUUAAAAUAAG |
| G017282 | | CUAGUCCGUUAUCAAAAUGGCACCGAGUCGGUG | | GCUAGUCCGUUAUCAAAAUGGCACCGAGUCGG*mU* |
| | | C | | mG*mC |
| N20- | 688 | N₂₀GUUUUAGAGCAAAGCAAGUUAAAAUAAGGC | 788 | (mN*)₃N₁₇GUUUUAGAGCAAAGCAAGUUAAAAUAAGGC |
| G017283 | | UAGUCCGUUAUCAAAAUGGCACCGAGUCGGUGC | | UAGUCCGUUAUCAAAAUGGCACCGAGUCGG*mU*mG* |
| | | | | mC |
| N20- | 689 | N₂₀GUUUUAGAGCGAAAGCAAGUUAAAAUAAGG | 789 | (mN*)₃N₁₇GUUUUAGAmGmCmGmAmAmAmGmCAAGUU |
| G013773 | | CUAGUCCGUUAUCAACUUGGCACCGAGUCGGUG | | AAAAUAAGGCUAGUCCGUUAUCAACUUGGCACCGAG |
| | | C | | UCGG*mU*mG*mC |
| N20- | 690 | N₂₀GUUUUAGAGCGAAAGCAAGUUAAAAUAAGG | 790 | (mN*)₃N₁₇GUUUUAGAmGmCmGmAmAmAmGmCAAGUU |
| G013776 | | CUAGUCCGUUAUCAAGAAAUGGCACCGAGUCGG | | AAAAUAAGGCUAGUCCGUUAUCAAGAAAUGGCACCG |
| | | UGC | | AGUCGG*mU*mG*mC |
| N20- | 691 | N₃NₓGUUUUAGAGCUAGAAAUAGCAAGUUAAAA | 791 | (mN*)N₁₇GUUUUAGAmGmCmUmAmGmAmAmAmUmAm |
| SMO7-6 | | UAAGGCUAGUCCGUUAUCACGAAAGGGCACCGA | | GmCAAGUUAAAAUAAGGCUAGUCCGUUAUCAmCmGm |
| | | GUCGGUGC | | AmAmAmGmGmGmCmAmCmCmGmAmGmUmCmGmG*m |
| | | | | U*mG*mC |
| N20- | 692 | N₃NₓGUUUUAGAGCUAGAAAUAGCAAGUUAAAA | 792 | (mN*)N₁₇GUUUUAGAmGmCmUmAmGmAmAmAmUmAm |
| SM12-6 | | UAAGGCUAGUCCGUUAUCAAAAUGGCACCGAGU | | GmCAAGUUAAAAUAAGGCUAGUCCGUUAUCAmAmA |
| | | CGGUGC | | mAmUmGmGmCmAmCmCmGmAmGmUmCmGmG*mU*m |
| | | | | G*mC |
| N20- | 693 | N₃NₓGUUUUAGAGCUAGAAAUAGCAAGUUAAAA | 793 | (mN*)₃N₁₇GUUUUAGAmGmCmUmAmGmAmAmAmUmAm |
| SM07-50 | | UAAGGCUAGUCCGUUAUCACGAAAGGGCACCGA | | GmCAAGUUAAAAUAAGGCUAGUCCGUUAUCACmGmA |
| | | GUCGGUGC | | mAmAmGmGmGmCmAmCmCmGmAmGmUmCmGmG*mU |
| | | | | *mG*mC |
| N20- | 694 | N₃NₓGUUUUAGAGCUAGAAAUAGCAAGUUAAAA | 794 | (mN*)₃N₁₇GUUUUAGAmGmCmUmAmGmAmAmAmUmAm |
| SM12-50 | | UAAGGCUAGUCCGUUAUCAAAAUGGCACCGAGU | | GmCAAGUUAAAAUAAGGCUAGUCCGUUAUCAAmAmA |
| | | CGGUGC | | mUmGmGmCmAmCmCmGmAmGmUmCmGmG*mU*mG* |
| | | | | mC |
| SM07-6 | 695 | ACACAAAUACCAGUCCAGCGGUUUUAGAGCUAG | 795 | mA*mC*mA*CAAAUACCAGUCCAGCGGUUUUAGAmG |
| | | AAAUAGCAAGUUAAAAUAAGGCUAGUCCGUUA | | mCmUmAmGmAmAmAmUmAmGmCAAGUUAAAAUAAG |
| | | UCACGAAAGGGCACCGAGUCGGUGC | | GCUAGUCCGUUAUCAmCmGmAmAmAmGmGmGmCmA |
| | | | | mCmCmGmAmGmUmCmGmG*mU*mG*mC |
| SM12-6 | 696 | ACACAAAUACCAGUCCAGCGGUUUUAGAGCUAG | 796 | mA*mC*mA*CAAAUACCAGUCCAGCGGUUUUAGAmG |
| | | AAAUAGCAAGUUAAAAUAAGGCUAGUCCGUUA | | mCmUmAmGmAmAmAmUmAmGmCAAGUUAAAAUAAG |
| | | UCAAAAUGGCACCGAGUCGGUGC | | GCUAGUCCGUUAUCAmAmAmAmUmGmGmCmAmCmC |
| | | | | mGmAmGmUmCmGmG*mU*mG*mC |
| SM07-50 | 697 | ACACAAAUACCAGUCCAGCGGUUUUAGAGCUAG | 797 | mA*mC*mA*CAAAUACCAGUCCAGCGGUUUUAGAmG |
| | | AAAUAGCAAGUUAAAAUAAGGCUAGUCCGUUA | | mCmUmAmGmAmAmAmUmAmGmCAAGUUAAAAUAAG |
| | | UCACGAAAGGGCACCGAGUCGGUGC | | GCUAGUCCGUUAUCACmGmAmAmAmGmGmGmCmAm |
| | | | | CmCmGmAmGmUmCmGmG*mU*mG*mC |
| SM12-50 | 698 | ACACAAAUACCAGUCCAGCGGUUUUAGAGCUAG | 798 | mA*mC*mA*CAAAUACCAGUCCAGCGGUUUUAGAmG |
| | | AAAUAGCAAGUUAAAAUAAGGCUAGUCCGUUA | | mCmUmAmGmAmAmAmUmAmGmCAAGUUAAAAUAAG |
| | | UCAAAAUGGCACCGAGUCGGUGC | | GCUAGUCCGUUAUCAAmAmAmUmGmGmCmAmCmCm |
| | | | | GmAmGmUmCmGmG*mU*mG*mC |
| | 699- | Not Used | 799- | Not Used |
| | 700 | | 800 | |
| G000390 | 801 | GCCGAGUCUGGAGAGCUGCAGUUUUAGAGCUA | 901 | mG*mC*mC*GAGUCUGGAGAGCUGCAGUUUUAGAmG |
| | | GAAAUAGCAAGUUAAAAUAAGGCUAGUCCGUU | | mCmUmAmGmAmAmAmUmAmGmCAAGUUAAAAUAAG |
| | | AUCAACUUGAAAAAGUGGCACCGAGUCGGUGCU | | GCUAGUCCGUUAUCAmAmCmUmUmGmAmAmAmAmA |
| | | UUU | | mGmUmGmGmCmAmCmCmGmAmGmUmCmGmGmUmG |
| | | | | mCmU*mU*mU*mU |
| G000531 | 802 | UCACAGGACCACUCACCCCAGUUUUAGAGCUAG | 902 | mU*mC*mA*CAGGACCACUCACCCCAGUUUUAGAmGm |
| | | AAAUAGCAAGUUAAAAUAAGGCUAGUCCGUUA | | CmUmAmGmAmAmAmUmAmGmCAAGUUAAAAUAAGG |
| | | UCAACUUGAAAAAGUGGCACCGAGUCGGUGCUU | | CUAGUCCGUUAUCAmAmCmUmUmGmAmAmAmAmAm |
| | | UU | | GmUmGmGmCmAmCmCmGmAmGmUmCmGmGmUmGm |
| | | | | CmU*mU*mU*mU |
| G000532 | 803 | UGCUCUGUAAGCUUACCCAGGUUUUAGAGCUAG | 903 | mU*mG*mC*UCUGUAAGCUUACCCAGGUUUUAGAmG |
| | | AAAUAGCAAGUUAAAAUAAGGCUAGUCCGUUA | | mCmUmAmGmAmAmAmUmAmGmCAAGUUAAAAUAAG |
| | | UCAACUUGAAAAAGUGGCACCGAGUCGGUGCUU | | GCUAGUCCGUUAUCAmAmCmUmUmGmAmAmAmAmA |
| | | UU | | mGmUmGmGmCmAmCmCmGmAmGmUmCmGmGmUmG |
| | | | | mCmU*mU*mU*mU |
| G000533 | 804 | GGACACCAAAUCGUACUGGAGUUUUAGAGCUA | 904 | mG*mG*mA*CACCAAAUCGUACUGGAGUUUUAGAmG |
| | | GAAAUAGCAAGUUAAAAUAAGGCUAGUCCGUU | | mCmUmAmGmAmAmAmUmAmGmCAAGUUAAAAUAAG |
| | | AUCAACUUGAAAAAGUGGCACCGAGUCGGUGCU | | GCUAGUCCGUUAUCAmAmCmUmUmGmAmAmAmAmA |
| | | UUU | | mGmUmGmGmCmAmCmCmGmAmGmUmCmGmGmUmG |
| | | | | mCmU*mU*mU*mU |
| G000534 | 805 | ACGCAAAUAUCAGUCCAGCGGUUUUAGAGCUAG | 905 | mA*mC*mG*CAAAUAUCAGUCCAGCGGUUUUAGAmG |
| | | AAAUAGCAAGUUAAAAUAAGGCUAGUCCGUUA | | mCmUmAmGmAmAmAmUmAmGmCAAGUUAAAAUAAG |
| | | UCAACUUGAAAAAGUGGCACCGAGUCGGUGCUU | | GCUAGUCCGUUAUCAmAmCmUmUmGmAmAmAmAmA |
| | | UU | | mGmUmGmGmCmAmCmCmGmAmGmUmCmGmGmUmG |
| | | | | mCmU*mU*mU*mU |
| G000535 | 806 | AAAGUCCUGGAUGCUGUCCGGUUUUAGAGCUA | 906 | mA*mA*mA*GUCCUGGAUGCUGUCCGGUUUUAGAmG |
| | | GAAAUAGCAAGUUAAAAUAAGGCUAGUCCGUU | | mCmUmAmGmAmAmAmUmAmGmCAAGUUAAAAUAAG |
| | | AUCAACUUGAAAAAGUGGCACCGAGUCGGUGCU | | GCUAGUCCGUUAUCAmAmCmUmUmGmAmAmAmAmA |
| | | UUU | | mGmUmGmGmCmAmCmCmGmAmGmUmCmGmGmUmG |
| | | | | mCmU*mU*mU*mU |
| G000536 | 807 | AACUGGACACCAAAUCGUACGUUUUAGAGCUAG | 907 | mA*mA*mC*UGGACACCAAAUCGUACGUUUUAGAmG |
| | | AAAUAGCAAGUUAAAAUAAGGCUAGUCCGUUA | | mCmUmAmGmAmAmAmUmAmGmCAAGUUAAAAUAAG |
| | | UCAACUUGAAAAAGUGGCACCGAGUCGGUGCUU | | GCUAGUCCGUUAUCAmAmCmUmUmGmAmAmAmAmA |
| | | UU | | mGmUmGmGmCmAmCmCmGmAmGmUmCmGmGmUmG |
| | | | | mCmU*mU*mU*mU |
| G000694 | 808 | ACGCAAAUAUCAGUCCAGCGGUUUUAGAGCUAG | 908 | mA*mC*mG*CAAAUAUCAGUCCAGCGGUUUUAGAmG |
| | | AAAUAGCAAGUUAAAAUAAGGCUAGUCCGUUA | | mCmUmAmGmAmAmAmUmAmGmCAAGUUAAAAUAAG |
| | | UCAACUUGGCACCGAGUCGGUGC | | GCUAGUCCGUUAUCAACUUGGCACCGAGUCGG*mU*m |
| | | | | G*mC |
| G018631 | 809 | ACGCAAAUAUCAGUCCAGCGGUUUUAGAGCUAG | 909 | mA*mC*mG*CAAAUAUCAGUCCAGCGGUUUUAGAmG |
| | | AAAUAGCAAGUUAAAAUAAGGCUAGUCCGUUA | | mCmUmAmGmAmAmAmUmAmGmCAAGUUAAAAUAAG |
| | | UCACGAAAGGGCACCGAGUCGGUGC | | GCUAGUCCGUUAUCACGAAAGGGCACCGAGUCGG*m |
| | | | | U*mG*mC |
| G018632 | 810 | ACGCAAAUAUCAGUCCAGCGGUUUUAGAGCUAG | 910 | mA*mC*mG*CAAAUAUCAGUCCAGCGGUUUUAGAmG |
| | | AAAUAGCAAGUUAAAAUAAGGCUAGUCCGUUA | | mCmUmAmGmAmAmAmUmAmGmCAAGUUAAAAUAAG |
| | | UCAAAAUGGCACCGAGUCGGUGC | | GCUAGUCCGUUAUCAAAAUGGCACCGAGUCGG*mU* |
| | | | | mG*mC |
| G018633 | 811 | ACGCAAAUAUCAGUCCAGCGGUUUUAGAGCUAG | 911 | mA*mC*mG*CAAAUAUCAGUCCAGCGGUUUUAGAmG |
| | | AAAUAGCAAGUUAAAAUAAGGCUAGUCCGUUA | | mCmUmAmGmAmAmAmUmAmGmCAAGUUAAAAUAAG |
| | | UCACGAAAGGGCACCGAGUCGGUGC | | GCUAGUCCGUUAUCAmCmGmAmAmAmGmGmGmCmA |
| | | | | mCmCmGmAmGmUmCmGmG*mU*mG*mC |
| G018634 | 812 | ACGCAAAUAUCAGUCCAGCGGUUUUAGAGCUAG | 912 | mA*mC*mG*CAAAUAUCAGUCCAGCGGUUUUAGAmG |
| | | AAAUAGCAAGUUAAAAUAAGGCUAGUCCGUUA | | mCmUmAmGmAmAmAmUmAmGmCAAGUUAAAAUAAG |
| | | UCAAAAUGGCACCGAGUCGGUGC | | GCUAGUCCGUUAUCAmAmAmAmUmGmGmCmAmCmC |
| | | | | mGmAmGmUmCmGmG*mU*mG*mC |
| G018635 | 813 | GCCGAGUCUGGAGAGCUGCAGUUUUAGAGCUA | 913 | mG*mC*mC*GAGUCUGGAGAGCUGCAGUUUUAGAmG |
| | | GAAAUAGCAAGUUAAAAUAAGGCUAGUCCGUU | | mCmUmAmGmAmAmAmUmAmGmCAAGUUAAAAUAAG |
| | | AUCACGAAAGGGCACCGAGUCGGUGC | | GCUAGUCCGUUAUCACGAAAGGGCACCGAGUCGG*m |
| | | | | U*mG*mC |
| G018639 | 814 | UGCUCUGUAAGCUUACCCAGGUUUUAGAGCUAG | 914 | mU*mG*mC*UCUGUAAGCUUACCCAGGUUUUAGAmG |
| | | AAAUAGCAAGUUAAAAUAAGGCUAGUCCGUUA | | mCmUmAmGmAmAmAmUmAmGmCAAGUUAAAAUAAG |
| | | UCACGAAAGGGCACCGAGUCGGUGC | | GCUAGUCCGUUAUCACGAAAGGGCACCGAGUCGG*m |
| | | | | U*mG*mC |
| G018643 | 815 | GCCGAGUCUGGAGAGCUGCAGUUUUAGAGCUA | 915 | mG*mC*mC*GAGUCUGGAGAGCUGCAGUUUUAGAmG |
| | | GAAAUAGCAAGUUAAAAUAAGGCUAGUCCGUU | | mCmUmAmGmAmAmAmUmAmGmCAAGUUAAAAUAAG |
| | | AUCAACUUGGCACCGAGUCGGUGC | | GCUAGUCCGUUAUCAACUUGGCACCGAGUCGG*mU*m |
| | | | | G*mC |
| G018644 | 816 | UGCUCUGUAAGCUUACCCAGGUUUUAGAGCUAG | 916 | mU*mG*mC*UCUGUAAGCUUACCCAGGUUUUAGAmG |
| | | AAAUAGCAAGUUAAAAUAAGGCUAGUCCGUUA | | mCmUmAmGmAmAmAmUmAmGmCAAGUUAAAAUAAG |
| | | UCAACUUGGCACCGAGUCGGUGC | | GCUAGUCCGUUAUCAACUUGGCACCGAGUCGG*mU*m |
| | | | | G*mC |
| G018804 | 817 | ACACAAAUACCAGUCCAGCGGUUUUAGAGCUAG | 917 | mA*mC*mA*CAAAUACCAGUCCAGCGGUUUUAGAmG |
| | | AAAUAGCAAGUUAAAAUAAGGCUAGUCCGUUA | | mCmUmAmGmAmAmAmUmAmGmCAAGUUAAAAUAAG |
| | | UCACGAAAGGGCACCGAGUCGGUGC | | GCUAGUCCGUUAUCAmCmGmAmAmAmGmGmGmCmA |
| | | | | mCmCmGmAmGmUmCmGmG*mU*mG*mC |
| G018805 | 818 | ACACAAAUACCAGUCCAGCGGUUUUAGAGCUAG | 918 | mA*mC*mA*CAAAUACCAGUCCAGCGGUUUUAGAmG |
| | | AAAUAGCAAGUUAAAAUAAGGCUAGUCCGUUA | | mCmUmAmGmAmAmAmUmAmGmCAAGUUAAAAUAAG |
| | | UCACGAAAGGGCACCGAGUCGGUGC | | GCUAGUCCGUUAUCACmGmAmAmAmGmGmGmCmAm |
| | | | | CmCmGmAmGmUmCmGmG*mU*mG*mC |
| G019874 | 819 | ACACAAAUACCAGUCCAGCGGUUUUAGAGCUAG | 919 | mA*mC*ACAA*AUACC*AGUCCAGCGmGU*UUUAG*A* |
| | | AAAUAGCAAGUUAAAAUAAGGCUAGUCCGUUA | | mGmCmUmAmGmAmAmAmUmAmGmCmAA*G*UUAAA |
| | | UCAACUUGAAAAAGUGGCACCGAGUCGGUGCUU | | AU*AAG*G*C*UmAGUCmCGUUA*UCA*A*mCmUmUm |
| | | UU | | GmAmAmAmAmAmGmUmGmGmCmAmCmCmGmAmGm |
| | | | | UmCmGmGmUmGmCmU*mU*mU*mU |
| G019875 | 820 | ACACAAAUACCAGUCCAGCGGUUUUAGAGCUAG | 920 | mA*mC*ACAA*AUACC*AGUCCAGCGmGU*UUUAG*A* |
| | | AAAUAGCAAGUUAAAAUAAGGCUAGUCCGUUA | | mGmCmUmAmGmAmAmAmUmAmGmCmAA*G*UUAAA |
| | | UCAACUUGGCACCGAGUCGGUGC | | AU*AAG*G*C*UmAGUCmCGUUA*UCA*A*mCmUmUm |
| | | | | GmGmCmAmCmCmGmAmGmUmCmGmG*mU*mG*mC |
| G019876 | 821 | ACACAAAUACCAGUCCAGCGGUUUUAGAGCUAG | 921 | mA*mC*mA*CAAAUACCAGUCCAGCGGUUUUAGAmG |
| | | AAAUAGCAAGUUAAAAUAAGGCUAGUCCGUUA | | mCmUmAmGmAmAmAmUmAmGmCAAGUUAAAAUAAG |
| | | UCACGAAAGGGCACCGAGUCGGUGC | | GCUAGUCCGUUAUCACmGmAmAmAmGmGGCACCGAG |
| | | | | UCGG*mU*mG*mC |
| G019877 | 822 | ACACAAAUACCAGUCCAGCGGUUUUAGAGCUAG | 922 | mA*mC*mA*CAAAUACCAGUCCAGCGGUUUUAGAmG |
| | | AAAUAGCAAGUUAAAAUAAGGCUAGUCCGUUA | | mCmUmAmGmAmAmAmUmAmGmCAAGUUAAAAUAAG |
| | | UCACGAAAGGGCACCGAGUCGGUGC | | GCUAGUCCGUUAUCACGAAAGGmGmCmAmCmCmGm |
| | | | | AmGmUmCmGmG*mU*mG*mC |
| G019878 | 823 | ACACAAAUACCAGUCCAGCGGUUUUAGAGCUAG | 923 | mA*mC*ACAA*AUACC*AGUCCAGCGmGU*UUUAG*A* |
| | | AAAUAGCAAGUUAAAAUAAGGCUAGUCCGUUA | | mGmCmUmAmGmAmAmAmUmAmGmCmAA*G*UUAAA |
| | | UCACGAAAGGGCACCGAGUCGGUGC | | AU*AAG*G*C*UmAGUCmCGUUA*UCA*C*GAAAGGGC |
| | | | | ACCGAGUCGG*mU*mG*mC |
| G019879 | 824 | ACACAAAUACCAGUCCAGCGGUUUUAGAGCUAG | 924 | mA*mC*ACAA*AUACC*AGUCCAGCGmGU*UUUAG*A* |
| | | AAAUAGCAAGUUAAAAUAAGGCUAGUCCGUUA | | mGmCmUmAmGmAmAmAmUmAmGmCmAA*G*UUAAA |
| | | UCACGAAAGGGCACCGAGUCGGUGC | | AU*AAG*G*C*UmAGUCmCGUUA*UCA*C*mGmAmAm |
| | | | | AmGmGmGmCmAmCmCmGmAmGmUmCmGmG*mU*mG |
| | | | | *mC |
| G019880 | 825 | ACACAAAUACCAGUCCAGCGGUUUUAGAGCUAG | 925 | mA*mC*ACAA*AUACC*AGUCCAGCGGUUUUAGAmGm |
| | | AAAUAGCAAGUUAAAAUAAGGCUAGUCCGUUA | | CmUmAmGmAmAmAmUmAmGmCAAGUUAAAAUAAG* |
| | | UCACGAAAGGGCACCGAGUCGGUGC | | G*C*UmAGUCmCGUUA*UCA*C*mGmAmAmAmGmGmG |
| | | | | mCmAmCmCmGmAmGmUmCmGmG*mU*mG*mC |
| G019881 | 826 | ACACAAAUACCAGUCCAGCGGUUUUAGAGCUAG | 926 | mA*mC*ACAA*AUACC*AGUCCAGCGmGU*UUUAG*A* |
| | | AAAUAGCAAGUUAAAAUAAGGCUAGUCCGUUA | | mGmCmUmAmGmAmAmAmUmAmGmCmAA*G*UUAAA |
| | | UCACGAAAGGGCACCGAGUCGGUGC | | AU*AAGGCUAGUCCGUUAUCA*C*mGmAmAmAmGmG |
| | | | | mGmCmAmCmCmGmAmGmUmCmGmG*mU*mG*mC |
| G019882 | 827 | ACACAAAUACCAGUCCAGCGGUUUUAGAGCUAG | 927 | mA*mC*ACAA*AUACC*AGUCCAGCGmGU*UUUAG*A* |
| | | AAAUAGCAAGUUAAAAUAAGGCUAGUCCGUUA | | mGmCmUmAmGmAmAmAmUmAmGmCmAA*G*UUAAA |
| | | UCACGAAAGGGCACCGAGUCGGUGC | | AU*AAG*G*C*UmAGUCmCGUUA*UCACmGmAmAmAm |
| | | | | GmGmGmCmAmCmCmGmAmGmUmCmGmG*mU*mG*m |
| | | | | C |
| G019883 | 828 | ACACAAAUACCAGUCCAGCGGUUUUAGAGCUAG | 928 | mA*mC*ACAAAUACCAGUCCAGCGGUUUUAGAmGmC |
| | | AAAUAGCAAGUUAAAAUAAGGCUAGUCCGUUA | | mUmAmGmAmAmAmUmAmGmCAAGUUAAAAUAAGGC |
| | | UCACGAAAGGGCACCGAGUCGGUGC | | UAGUCCGUUAUCACGAAAGGGCACCGAGUCGG*mU* |
| | | | | mG*mC |
| G019884 | 829 | ACACAAAUACCAGUCCAGCGGUUUUAGAGCUAG | 929 | mA*mC*mA*CAA*AUACCAGUCCAGCGGUUUUAGAmG |
| | | AAAUAGCAAGUUAAAAUAAGGCUAGUCCGUUA | | mCmUmAmGmAmAmAmUmAmGmCAAGUUAAAAUAAG |
| | | UCACGAAAGGGCACCGAGUCGGUGC | | GCUAGUCCGUUAUCACGAAAGGGCACCGAGUCGG*m |
| | | | | U*mG*mC |
| G019885 | 830 | ACACAAAUACCAGUCCAGCGGUUUUAGAGCUAG | 930 | mA*mC*mA*CAAAUACC*AGUCCAGCGGUUUUAGAmG |
| | | AAAUAGCAAGUUAAAAUAAGGCUAGUCCGUUA | | mCmUmAmGmAmAmAmUmAmGmCAAGUUAAAAUAAG |
| | | UCACGAAAGGGCACCGAGUCGGUGC | | GCUAGUCCGUUAUCACGAAAGGGCACCGAGUCGG*m |
| | | | | U*mG*mC |
| G019886 | 831 | ACACAAAUACCAGUCCAGCGGUUUUAGAGCUAG | 931 | mA*mC*mA*CAAAUACCAGUCCAGCGmGUUUUAGAm |
| | | AAAUAGCAAGUUAAAAUAAGGCUAGUCCGUUA | | GmCmUmAmGmAmAmAmUmAmGmCAAGUUAAAAUAA |
| | | UCACGAAAGGGCACCGAGUCGGUGC | | GGCUAGUCCGUUAUCACGAAAGGGCACCGAGUCGG* |
| | | | | mU*mG*mC |
| G019887 | 832 | ACACAAAUACCAGUCCAGCGGUUUUAGAGCUAG | 932 | mA*mC*mA*CAAAUACCAGUCCAGCGGU*UUUAGAmG |
| | | AAAUAGCAAGUUAAAAUAAGGCUAGUCCGUUA | | mCmUmAmGmAmAmAmUmAmGmCAAGUUAAAAUAAG |
| | | UCACGAAAGGGCACCGAGUCGGUGC | | GCUAGUCCGUUAUCACGAAAGGGCACCGAGUCGG*m |
| | | | | U*mG*mC |
| G019888 | 833 | ACACAAAUACCAGUCCAGCGGUUUUAGAGCUAG | 933 | mA*mC*mA*CAAAUACCAGUCCAGCGGUUUUAG*AmG |
| | | AAAUAGCAAGUUAAAAUAAGGCUAGUCCGUUA | | mCmUmAmGmAmAmAmUmAmGmCAAGUUAAAAUAAG |
| | | UCACGAAAGGGCACCGAGUCGGUGC | | GCUAGUCCGUUAUCACGAAAGGGCACCGAGUCGG*m |
| | | | | U*mG*mC |
| G019889 | 834 | ACACAAAUACCAGUCCAGCGGUUUUAGAGCUAG | 934 | mA*mC*mA*CAAAUACCAGUCCAGCGGUUUUAGA*mG |
| | | AAAUAGCAAGUUAAAAUAAGGCUAGUCCGUUA | | mCmUmAmGmAmAmAmUmAmGmCAAGUUAAAAUAAG |
| | | UCACGAAAGGGCACCGAGUCGGUGC | | GCUAGUCCGUUAUCACGAAAGGGCACCGAGUCGG*m |
| | | | | U*mG*mC |
| G019890 | 835 | ACACAAAUACCAGUCCAGCGGUUUUAGAGCUAG | 935 | mA*mC*mA*CAAAUACCAGUCCAGCGGUUUUAGAmG |
| | | AAAUAGCAAGUUAAAAUAAGGCUAGUCCGUUA | | mCmUmAmGmAmAmAmUmAmGmCmAAGUUAAAAUAA |
| | | UCACGAAAGGGCACCGAGUCGGUGC | | GGCUAGUCCGUUAUCACGAAAGGGCACCGAGUCGG* |
| | | | | mU*mG*mC |
| G019891 | 836 | ACACAAAUACCAGUCCAGCGGUUUUAGAGCUAG | 936 | mA*mC*mA*CAAAUACCAGUCCAGCGGUUUUAGAmG |
| | | AAAUAGCAAGUUAAAAUAAGGCUAGUCCGUUA | | mCmUmAmGmAmAmAmUmAmGmCAA*GUUAAAAUAA |
| | | UCACGAAAGGGCACCGAGUCGGUGC | | GGCUAGUCCGUUAUCACGAAAGGGCACCGAGUCGG* |
| | | | | mU*mG*mC |
| G019892 | 837 | ACACAAAUACCAGUCCAGCGGUUUUAGAGCUAG | 937 | mA*mC*mA*CAAAUACCAGUCCAGCGGUUUUAGAmG |
| | | AAAUAGCAAGUUAAAAUAAGGCUAGUCCGUUA | | mCmUmAmGmAmAmAmUmAmGmCAAG*UUAAAAUAA |
| | | UCACGAAAGGGCACCGAGUCGGUGC | | GGCUAGUCCGUUAUCACGAAAGGGCACCGAGUCGG* |
| | | | | mU*mG*mC |
| G019893 | 838 | ACACAAAUACCAGUCCAGCGGUUUUAGAGCUAG | 938 | mA*mC*mA*CAAAUACCAGUCCAGCGGUUUUAGAmG |
| | | AAAUAGCAAGUUAAAAUAAGGCUAGUCCGUUA | | mCmUmAmGmAmAmAmUmAmGmCAAGUUAAAAU*AA |
| | | UCACGAAAGGGCACCGAGUCGGUGC | | GGCUAGUCCGUUAUCACGAAAGGGCACCGAGUCGG* |
| | | | | mU*mG*mC |
| G019894 | 839 | ACACAAAUACCAGUCCAGCGGUUUUAGAGCUAG | 939 | mA*mC*mA*CAAAUACCAGUCCAGCGGUUUUAGAmG |
| | | AAAUAGCAAGUUAAAAUAAGGCUAGUCCGUUA | | mCmUmAmGmAmAmAmUmAmGmCAAGUUAAAAUAAG |
| | | UCACGAAAGGGCACCGAGUCGGUGC | | *GCUAGUCCGUUAUCACGAAAGGGCACCGAGUCGG*m |
| | | | | U*mG*mC |
| G019895 | 840 | ACACAAAUACCAGUCCAGCGGUUUUAGAGCUAG | 940 | mA*mC*mA*CAAAUACCAGUCCAGCGGUUUUAGAmG |
| | | AAAUAGCAAGUUAAAAUAAGGCUAGUCCGUUA | | mCmUmAmGmAmAmAmUmAmGmCAAGUUAAAAUAAG |
| | | UCACGAAAGGGCACCGAGUCGGUGC | | G*CUAGUCCGUUAUCACGAAAGGGCACCGAGUCGG*m |
| | | | | U*mG*mC |
| G019896 | 841 | ACACAAAUACCAGUCCAGCGGUUUUAGAGCUAG | 941 | mA*mC*mA*CAAAUACCAGUCCAGCGGUUUUAGAmG |
| | | AAAUAGCAAGUUAAAAUAAGGCUAGUCCGUUA | | mCmUmAmGmAmAmAmUmAmGmCAAGUUAAAAUAAG |
| | | UCACGAAAGGGCACCGAGUCGGUGC | | GC*UAGUCCGUUAUCACGAAAGGGCACCGAGUCGG*m |
| | | | | U*mG*mC |
| G019897 | 842 | ACACAAAUACCAGUCCAGCGGUUUUAGAGCUAG | 942 | mA*mC*mA*CAAAUACCAGUCCAGCGGUUUUAGAmG |
| | | AAAUAGCAAGUUAAAAUAAGGCUAGUCCGUUA | | mCmUmAmGmAmAmAmUmAmGmCAAGUUAAAAUAAG |
| | | UCACGAAAGGGCACCGAGUCGGUGC | | GCUmAGUCCGUUAUCACGAAAGGGCACCGAGUCGG* |
| | | | | mU*mG*mC |
| G019898 | 843 | ACACAAAUACCAGUCCAGCGGUUUUAGAGCUAG | 943 | mA*mC*mA*CAAAUACCAGUCCAGCGGUUUUAGAmG |
| | | AAAUAGCAAGUUAAAAUAAGGCUAGUCCGUUA | | mCmUmAmGmAmAmAmUmAmGmCAAGUUAAAAUAAG |
| | | UCACGAAAGGGCACCGAGUCGGUGC | | GCUAGUCmCGUUAUCACGAAAGGGCACCGAGUCGG* |
| | | | | mU*mG*mC |
| G019899 | 844 | ACACAAAUACCAGUCCAGCGGUUUUAGAGCUAG | 944 | mA*mC*mA*CAAAUACCAGUCCAGCGGUUUUAGAmG |
| | | AAAUAGCAAGUUAAAAUAAGGCUAGUCCGUUA | | mCmUmAmGmAmAmAmUmAmGmCAAGUUAAAAUAAG |
| | | UCACGAAAGGGCACCGAGUCGGUGC | | GCUAGUCCGUUA*UCACGAAAGGGCACCGAGUCGG*m |
| | | | | U*mG*mC |
| G019900 | 845 | ACACAAAUACCAGUCCAGCGGUUUUAGAGCUAG | 945 | mA*mC*mA*CAAAUACCAGUCCAGCGGUUUUAGAmG |
| | | AAAUAGCAAGUUAAAAUAAGGCUAGUCCGUUA | | mCmUmAmGmAmAmAmUmAmGmCAAGUUAAAAUAAG |
| | | UCACGAAAGGGCACCGAGUCGGUGC | | GCUAGUCCGUUAUCA*CGAAAGGGCACCGAGUCGG*m |
| | | | | U*mG*mC |
| G019901 | 846 | ACACAAAUACCAGUCCAGCGGUUUUAGAGCUAG | 946 | mA*mC*mA*CAAAUACCAGUCCAGCGGUUUUAGAmG |
| | | AAAUAGCAAGUUAAAAUAAGGCUAGUCCGUUA | | mCmUmAmGmAmAmAmUmAmGmCAAGUUAAAAUAAG |
| | | UCACGAAAGGGCACCGAGUCGGUGC | | GCUAGUCCGUUAUCAC*GAAAGGGCACCGAGUCGG*m |
| | | | | U*mG*mC |
| G019902 | 847 | ACACAAAUACCAGUCCAGCGGUUUUAGAGCUAG | 947 | mA*mC*ACAA*AUACC*AGUCCAGCGGUUUUAGAmGm |
| | | AAAUAGCAAGUUAAAAUAAGGCUAGUCCGUUA | | CmUmAmGmAmAmAmUmAmGmCAAGUUAAAAUAAGG |
| | | UCACGAAAGGGCACCGAGUCGGUGC | | CUAGUCCGUUAUCACGAAAGGGCACCGAGUCGG*mU* |
| | | | | mG*mC |
| G019903 | 848 | ACACAAAUACCAGUCCAGCGGUUUUAGAGCUAG | 948 | mA*mC*mA*CAAAUACCAGUCCAGCGmGU*UUUAG*A |
| | | AAAUAGCAAGUUAAAAUAAGGCUAGUCCGUUA | | *mGmCmUmAmGmAmAmAmUmAmGmCmAA*G*UUAA |
| | | UCACGAAAGGGCACCGAGUCGGUGC | | AAU*AAGGCUAGUCCGUUAUCACGAAAGGGCACCGA |
| | | | | GUCGG*mU*mG*mC |
| G019904 | 849 | ACACAAAUACCAGUCCAGCGGUUUUAGAGCUAG | 949 | mA*mC*mA*CAAAUACCAGUCCAGCGGUUUUAGAmG |
| | | AAAUAGCAAGUUAAAAUAAGGCUAGUCCGUUA | | mCmUmAmGmAmAmAmUmAmGmCAAGUUAAAAUAAG |
| | | UCACGAAAGGGCACCGAGUCGGUGC | | *G*C*UmAGUCmCGUUA*UCACGAAAGGGCACCGAGU |
| | | | | CGG*mU*mG*mC |
| G019905 | 850 | ACACAAAUACCAGUCCAGCGGUUUUAGAGCUAG | 950 | mA*mC*mA*CAAAUACCAGUCCAGCGGUUUUAGAmG |
| | | AAAUAGCAAGUUAAAAUAAGGCUAGUCCGUUA | | mCmUmAmGmAmAmAmUmAmGmCAAGUUAAAAUAAG |
| | | UCACGAAAGGGCACCGAGUCGGUGC | | GCUAGUCCGUUAUCA*C*GAAAGGGCACCGAGUCGG* |
| | | | | mU*mG*mC |
| G019906 | 851 | ACACAAAUACCAGUCCAGCGGUUUUAGAGCUAG | 951 | mA*mC*mA*CAAAUACCAGUCCAGCGGUUUUCGAmGm |
| | | AAAUAGCAAGUUAAAAUAAGGCUAGUCCGUUA | | CmUmAmGmAmAmAmUmAmGmCAAGUGAAAAUAAGG |
| | | UCACGAAAGGGCACCGAGUCGGUGC | | CUAGUCCGUUAUCACGAAAGGGCACCGAGUCGG*mU* |
| | | | | mG*mC |
| G019907 | 852 | ACACAAAUACCAGUCCAGCGGUUUUCGAGCUAG | 952 | mA*mC*mA*CAAAUACCAGUCCAGCGGUUUUAGAmG |
| | | AAAUAGCAAGUGAAAAUAAGGCUAGUCCGUUA | | mCmUmAmGmAmAmAmUmAmGmCAAGUUAAAAUGAG |
| | | UCACGAAAGGGCACCGAGUCGGUGC | | GCUAGUCCGUUAUCACGAAAGGGCACCGAGUCGG*m |
| | | | | U*mG*mC |
| G019908 | 853 | ACACAAAUACCAGUCCAGCGGUUUUAGAGCUAG | 953 | mA*mC*ACAA*AUACC*AGUCCAGCGmGU*UUUAG*A* |
| | | AAAUAGCAAGUUAAAAUGAGGCUAGUCCGUUA | | mGmCmUmAmGmAmAmAmUmAmGmCmAA*G*UUAAA |
| | | UCACGAAAGGGCACCGAGUCGGUGC | | AU*GAG*G*C*UmAGUCmCGUUA*UCA*C*mGmAmAm |
| | | | | AmGmGmGmCmAmCmCmGmAmGmUmCmGmG*mU*mG |
| | | | | *mC |
| G019909 | 854 | ACACAAAUACCAGUCCAGCGGUUUUAGAGCUAG | 954 | mA*mC*mA*CAAAUACCAGUCCAGCGGUUUUAGAmG |
| | | AAAUAGCAAGUUAAAAUGAGGCUAGUCCGUUA | | mCmUmAmGmAmAmAmUmAmGmCAAGUUAAAAUAAG |
| | | UCACGAAAGGGCACCGAGUCGGUGC | | GCUAGUCCGUGAUCACGAAAGGGCACCGAGUCGG*m |
| | | | | U*mG*mC |
| G019910 | 855 | ACACAAAUACCAGUCCAGCGGUUUUAGAGCUAG | 955 | mA*mC*ACAA*AUACC*AGUCCAGCGmGU*UUUAG*A* |
| | | AAAUAGCAAGUUAAAAUAAGGCUAGUCCGUGA | | mGmCmUmAmGmAmAmAmUmAmGmCmAA*G*UUAAA |
| | | UCACGAAAGGGCACCGAGUCGGUGC | | AU*AAG*G*C*UmAGUCmCGUGA*UCA*C*mGmAmAm |
| | | | | AmGmGmGmCmAmCmCmGmAmGmUmCmGmG*mU*mG |
| | | | | *mC |
| G019911 | 856 | ACACAAAUACCAGUCCAGCGGUUUUAGAGCUAG | 956 | mA*mC*mA*CAAAUACCAGUCCAGCGGUUUUAGAmG |
| | | AAAUAGCAAGUUAAAAUAAGGCUAGUCCGUGA | | mCmUmAmGmAmAmAmUmAmGmCAAGUUAAAAUAAG |
| | | UCACGAAAGGGCACCGAGUCGGUGC | | GCUAGUCCGUUAUCCCGAAAGGGCACCGAGUCGG*m |
| | | | | U*mG*mC |
| G019912 | 857 | ACACAAAUACCAGUCCAGCGGUUUUAGAGCUAG | 957 | mA*mC*ACAA*AUACC*AGUCCAGCGmGU*UUUAG*A* |
| | | AAAUAGCAAGUUAAAAUAAGGCUAGUCCGUUA | | mGmCmUmAmGmAmAmAmUmAmGmCmAA*G*UUAAA |
| | | UCCCGAAAGGGCACCGAGUCGGUGC | | AU*AAG*G*C*UmAGUCmCGUUA*UCC*C*mGmAmAmA |
| | | | | mGmGmGmCmAmCmCmGmAmGmUmCmGmG*mU*mG* |
| | | | | mC |
| G019913 | 858 | ACACAAAUACCAGUCCAGCGGUUUUAGAGCUAG | 958 | mA*mC*mA*CAAAUACCAGUCCAGCGGUUUUCGAmGm |
| | | AAAUAGCAAGUUAAAAUAAGGCUAGUCCGUUA | | CmUmAmGmAmAmAmUmAmGmCAAGUGAAAAUGAGG |
| | | UCCCGAAAGGGCACCGAGUCGGUGC | | CUAGUCCGUGAUCCCGAAAGGGCACCGAGUCGG*mU* |
| | | | | mG*mC |
| G019914 | 859 | ACACAAAUACCAGUCCAGCGGUUUUCGAGCUAG | 959 | mA*mC*ACAA*AUACC*AGUCCAGCGmGU*UUUCG*A* |
| | | AAAUAGCAAGUGAAAAUGAGGCUAGUCCGUGA | | mGmCmUmAmGmAmAmAmUmAmGmCmAA*G*UGAAA |
| | | UCCCGAAAGGGCACCGAGUCGGUGC | | AU*GAG*G*C*UmAGUCmCGUGA*UCC*C*mGmAmAmA |
| | | | | mGmGmGmCmAmCmCmGmAmGmUmCmGmG*mU*mG* |
| | | | | mC |
| G019915 | 860 | ACACAAAUACCAGUCCAGCGGUUUUCGAGCUAG | 960 | mA*mC*ACAA*AUACC*AGUCCAGCGmGU*UUU*AG*A |
| | | AAAUAGCAAGUGAAAAUGAGGCUAGUCCGUGA | | *mGmCmUmAmGmAmAmAmUmAmGmCmAA*G*UU*AA |
| | | UCCCGAAAGGGCACCGAGUCGGUGC | | AAU*AAG*G*C*UmAGUCmCGUU*A*UC*A*C*mGmAm |
| | | | | AmAmGmGmGmCmAmCmCmGmAmGmUmCmGmG*mU* |
| | | | | mG*mC |
| G019916 | 861 | ACACAAAUACCAGUCCAGCGGUUUUAGAGCUAG | 961 | mA*mC*ACAA*AUACC*AGUCCAGCGmGU*UUU*AG*A |
| | | AAAUAGCAAGUUAAAAUAAGGCUAGUCCGUUA | | *mGmCmUmAmGmAmAmAmUmAmGmCmAA*G*UU*AA |
| | | UCACGAAAGGGCACCGAGUCGGUGC | | AAU*AAG*G*C*UmAGUCmCGUU*A*UC*A*C*mGmAm |
| | | | | AmAmGmGmGmCmAmCmCmGmAmGmUmCmGmG*mU* |
| | | | | mG*mC |
| G020022 | 862 | ACACAAAUACCAGUCCAGCGGUUUUAGAGCUAG | 962 | mA*mC*mA*CAAAUACCAGUCCAGCGGUUUUAGAmG |
| | | AAAUAGCAAGUUAAAAUAAGGCUAGUCCGUUA | | mCmUmAmGmAmAmAmUmAmGmCAAGUUAAAAUAAG |
| | | UCACGAAAGGGCACCGAGUCGGUGC | | GCUAGUCCGUUAUCACmGmAmAmAmGGGCACCGAGU |
| | | | | CGG*mU*mG*mC |
| G020023 | 863 | ACACAAAUACCAGUCCAGCGGUUUUAGAGCUAG | 963 | mA*mC*mA*CAAAUACCAGUCCAGCGGUUUUAGAmG |
| | | AAAUAGCAAGUUAAAAUAAGGCUAGUCCGUUA | | mCmUmAmGmAmAmAmUmAmGmCAAGUUAAAAUAAG |
| | | UCACGAAAGGGCACCGAGUCGGUGC | | GCUAGUCCGUUAUCACGAAAGGmGmCmAmCmCmGfAf |
| | | | | GfUfCmGmG*mU*mG*mC |
| G020024 | 864 | ACACAAAUACCAGUCCAGCGGUUUUAGAGCUAG | 964 | mA*mC*mA*CAAAUACCAGUCCAGCGGUUUUAGAmG |
| | | AAAUAGCAAGUUAAAAUAAGGCUAGUCCGUUA | | mCmUmAmGmAmAmAmUmAmGmCAAGUUAAAAUAAG |
| | | UCACGAAAGGGCACCGAGUCGGUGC | | GCUAGUCCGUUAUCACGAAAGGmGmCmAmCmCmGAG |
| | | | | UCmGmG*mU*mG*mC |
| G020025 | 865 | ACACAAAUACCAGUCCAGCGGUUUUAGAGCUAG | 965 | mA*mC*mACAAAUACCAGUCCAGCGmGUUUUAGAmG |
| | | AAAUAGCAAGUUAAAAUAAGGCUAGUCCGUUA | | mCmUmAmGmAmAmAmUmAmGmCmAAGUUAAAAUAA |
| | | UCACGAAAGGGCACCGAGUCGGUGC | | GGCUmAGUCmCGUUAUCACmGmAmAmAmGG*mGmC |
| | | | | mAmCmCmGAGUCmGmG*mU*mG*mC |
| G020026 | 866 | ACACAAAUACCAGUCCAGCGGUUUUAGAGCUAG | 966 | mA*mC*fAfCAfA*AfUfAfCfC*AfGUCCfAfGCfGm |
| | | AAAUAGCAAGUUAAAAUAAGGCUAGUCCGUUA | | GU*UUUAG*fA*mGmCmUmAmGmAmAmAmUmAmGmCmA |
| | | UCACGAAAGGGCACCGAGUCGGUGC | | fA*G*UUfAAfAAfU*fAfAfG*fG*fC*fUmAGUCmC |
| | | | | fGUUA*fUfCA*C*fG*mAmAmAmGfG*mGmCmAmCmC |
| | | | | mGfA*fG*fUfCmGmGmU*mG*mC |
| G020027 | 867 | ACACAAAUACCAGUCCAGCGGUUUUAGAGCUAG | 967 | mA*mC*ACAA*AUACC*AGUCCAGCGmGU*UUUAG*A* |
| | | AAAUAGCAAGUUAAAAUAAGGCUAGUCCGUUA | | mGmCmUmAmGmAmAmAmUmAmGmCmAA*G*UUAAA |
| | | UCACGAAAGGGCACCGAGUCGGUGC | | AU*AAG*G*C*UmAGUCmCGUUA*UCA*C*G*mAmAmA |
| | | | | mGG*mGmCmAmCmCmGA*G*UCmGmGmU*mG*mC |
| G020028 | 868 | ACACAAAUACCAGUCCAGCGGUUUUAGAGCUAG | 968 | mA*mC*fAfCAfAAfUfAfCfCAfGUCCfAfGCfGmG |
| | | AAAUAGCAAGUUAAAAUAAGGCUAGUCCGUUA | | U*UUUAG*fAmGmCmUmAmGmAmAmAmUmAmGmCmAfA |
| | | UCACGAAAGGGCACCGAGUCGGUGC | | G*UUfAAfAAfUfAfAfGfGfCfUmAGUCmCfGUUA* |
| | | | | fUfCA*C*fGmAmAmAmGfGmGmCmAmCmCmGfAfGfU |
| | | | | fCmGmGmU*mG*mC |
| G020029 | 869 | ACACAAAUACCAGUCCAGCGGUUUUAGAGCUAG | 969 | mA*mC*ACAAAUACCAGUCCAGCGmGU*UUUAG*fA*m |
| | | AAAUAGCAAGUUAAAAUAAGGCUAGUCCGUGA | | GmCmUmAmGmAmAmAmUmAmGmCmAfA*G*UUfAAfA |
| | | UCACGAAAGGGCACCGAGUCGGUGC | | AfU*fAfAfG*fG*fC*fUmAGUCmCfGUGA*fUfCA* |
| | | | | C*fG*mAmAmAmGfG*mGmCmAmCmCmGfA*fG*fUfC |
| | | | | mGmGmU*mG*mC |
| G020030 | 870 | ACACAAAUACCAGUCCAGCGGUUUUAGAGCUAG | 970 | mA*mC*fAfCAfA*AfUfAfCfC*AfGUCCfAfGCfGm |
| | | AAAUAGCAAGUUAAAAUAAGGCUAGUCCGUUA | | GU*UUUfAfG*fA*mGmCmUmAmGmAmAmAmUmAmGmC |
| | | UCACGAAAGGGCACCGAGUCGGUGC | | mAfA*fG*fUfUfAAfAfAfU*fAfAfG*fG*fC*fUm |
| | | | | AGfUCmCfGfUUfA*fUfCfA*fC*fG*mAmAmAmGf |
| | | | | G*mGmCmAmCmCmGfA*fG*fUfCmGmGmU*mG*mC |
| G020349 | 871 | ACACAAAUACCAGUCCAGCGGUUUUAGAGCUAG | 971 | mA*mC*mA*mCAA*A*fU*fA*fC*fCAfGfUCC*fAf |
| | | AAAUAGCAAGUUAAAAUAAGGCUAGUCCGUUA | | GCGmGUUUfUAGmAmGmCmUmAmGmAmAmAmUmAmGmC |
| | | UCACGAAAGGGCACCGAGUCGGUGC | | mAmAGUfUmAfAmAfAmUAmAmGmGmCmUmAGUmCmCG |
| | | | | UfUAmUmCAmCmGmAmAmAmGmGmGmCmAmCmCmG |
| | | | | mAmGmUmCmGmG*mU*mG*mC |
| G020350 | 872 | ACACAAAUACCAGUCCAGCGGUUUUAGAGCUAG | 972 | mA*mC*mA*mCAA*A*fU*fA*fC*fCAfGfUCC*fA |
| | | AAAUAGCAAGUUAAAAUAAGGCUAGUCCGUUA | | fGCGGUUUUAGAmGmCmUmAmGmAmAmAmUmAmGmCAA |
| | | UCACGAAAGGGCACCGAGUCGGUGC | | GUUAAAAUAAGGCUAGUCCGUUAUCACGAAAGGGCACC |
| | | | | GAGUCGG*mU*mG*mC |
| G020351 | 873 | ACACAAAUACCAGUCCAGCGGUUUUAGAGCUAG | 973 | mA*mC*mA*mCAAAfU*ACfCAfGUCC*AGCGmGUUUf |
| | | AAAUAGCAAGUUAAAAUAAGGCUAGUCCGUUA | | UAGmAmGmCmUmAmGmAmAmAmUmAmGmCmAmAGUf |
| | | UCACGAAAGGGCACCGAGUCGGUGC | | UAAAAmUAAGGCmUAGUCCGUfUAUmCACGAAAGGm |
| | | | | GmCmAmCmCmGmAmGmUmCmGmG*mU*mG*mC |
| G020352 | 874 | ACACAAAUACCAGUCCAGCGGUUUUAGAGCUAG | 974 | mA*mC*mA*mCAAAfU*ACfCAfGUCC*AGCGmGUUUU |
| | | AAAUAGCAAGUUAAAAUAAGGCUAGUCCGUUA | | AmGmAmGCmUAmGmAmAmAmUAmGCmAmAGUfUAAA |
| | | UCACGAAAGGGCACCGAGUCGGUGC | | AmUAAGGCmUAGUCCGUfUA*mUmCA*CmGmAmAmA |
| | | | | mGmGGmCAmCCGfAfGfUCmGG*mU*mG*mC |
| G020353 | 875 | ACACAAAUACCAGUCCAGCGGUUUUAGAGCUAG | 975 | mA*mC*mA*CAAAUACCAGUCCAGCGGUUUUAGAmGC |
| | | AAAUAGCAAGUUAAAAUAAGGCUAGUCCGUUA | | mUAmGmAmAmAmUAmGCAAGUUAAAAUAAGGCUAG |
| | | UCACGAAAGGGCACCGAGUCGGUGC | | UCCGUUAUCACGAAAGGGmCAmCCGfAfGfUCmGG*mU |
| | | | | *mG*mC |
| | 876- | Not Used | 976- | Not Used |
| | 900 | | 1000 | |

In Table 1A, (N)ₓ represents x contiguous nucleotides, where x is 5, 6, 7, 8, 9, 10, 11, 12, 13, 14, 15, 16, 17, 18, 19, 20, 21, 22, 23, 24, or 25. (mN*)₃ represents three consecutive nucleotides each having any base, a 2’-OMe, and a 3’ PS linkage to the next nucleotide. N₁₇ and N₂₀ represent 17 and 20 consecutive N (any nucleotide), respectively. “C-” appended to a Guide ID indicates the conserved portion of an sgRNA.
Nucleotide modifications are indicated in Table 1A as follows: m: 2’-OMe; *: PS linkage; f: 2’-fluoro; (invd): inverted abasic; moe: 2’-moe; e: ENA; d: deoxyribonucleotide (also note that T is always a deoxyribonucleotide); x: UNA. Thus, for example, mA represents 2’-O-methyl adenosine; xA represents a UNA nucleotide with an adenine nucleobase; eA represents an ENA nucleotide with an adenine nucleobase; and dA represents an adenosine deoxyribonucleotide.

TABLE 1B
(Table of RNA-Guided DNA Binding Agent Sequences):

| SEQ ID NO | Name | Sequence |
|---|---|---|
| 1099 | Cas9 mRNA | GGGUCCCGCAGUCGGCGUCCAGCGGCUCUGCUUGUUCGUGUGUGUGUCGUUGCAGGCCUUAUUCGGAUC |
| | sequence | CGCCACCAUGGACAAGAAGUACAGCAUCGGACUGGACAUCGGAACAAACAGCGUCGGAUGGGCAGUCAU |
| | | CACAGACGAAUACAAGGUCCCGAGCAAGAAGUUCAAGGUCCUGGGAAACACAGACAGACACAGCAUCAA |
| | | GAAGAACCUGAUCGGAGCACUGCUGUUCGACAGCGGAGAAACAGCAGAAGCAACAAGACUGAAGAGAAC |
| | | AGCAAGAAGAAGAUACACAAGAAGAAAGAACAGAAUCUGCUACCUGCAGGAAAUCUUCAGCAACGAAAU |
| | | GGCAAAGGUCGACGACAGCUUCUUCCACAGACUGGAAGAAAGCUUCCUGGUCGAAGAAGACAAGAAGCA |
| | | CGAAAGACACCCGAUCUUCGGAAACAUCGUCGACGAAGUCGCAUACCACGAAAAGUACCCGACAAUCUAC |
| | | CACCUGAGAAAGAAGCUGGUCGACAGCACAGACAAGGCAGACCUGAGACUGAUCUACCUGGCACUGGCA |
| | | CACAUGAUCAAGUUCAGAGGACACUUCCUGAUCGAAGGAGACCUGAACCCGGACAACAGCGACGUCGAC |
| | | AAGCUGUUCAUCCAGCUGGUCCAGACAUACAACCAGCUGUUCGAAGAAAACCCGAUCAACGCAAGCGGA |
| | | GUCGACGCAAAGGCAAUCCUGAGCGCAAGACUGAGCAAGAGCAGAAGACUGGAAAACCUGAUCGCACAG |
| | | CUGCCGGGAGAAAAGAAGAACGGACUGUUCGGAAACCUGAUCGCACUGAGCCUGGGACUGACACCGAAC |
| | | UUCAAGAGCAACUUCGACCUGGCAGAAGACGCAAAGCUGCAGCUGAGCAAGGACACAUACGACGACGAC |
| | | CUGGACAACCUGCUGGCACAGAUCGGAGACCAGUACGCAGACCUGUUCCUGGCAGCAAAGAACCUGAGC |
| | | GACGCAAUCCUGCUGAGCGACAUCCUGAGAGUCAACACAGAAAUCACAAAGGCACCGCUGAGCGCAAGC |
| | | AUGAUCAAGAGAUACGACGAACACCACCAGGACCUGACACUGCUGAAGGCACUGGUCAGACAGCAGCUG |
| | | CCGGAAAAGUACAAGGAAAUCUUCUUCGACCAGAGCAAGAACGGAUACGCAGGAUACAUCGACGGAGGA |
| | | GCAAGCCAGGAAGAAUUCUACAAGUUCAUCAAGCCGAUCCUGGAAAAGAUGGACGGAACAGAAGAACUG |
| | | CUGGUCAAGCUGAACAGAGAAGACCUGCUGAGAAAGCAGAGAACAUUCGACAACGGAAGCAUCCCGCAC |
| | | CAGAUCCACCUGGGAGAACUGCACGCAAUCCUGAGAAGACAGGAAGACUUCUACCCGUUCCUGAAGGAC |
| | | AACAGAGAAAAGAUCGAAAAGAUCCUGACAUUCAGAAUCCCGUACUACGUCGGACCGCUGGCAAGAGGA |
| | | AACAGCAGAUUCGCAUGGAUGACAAGAAAGAGCGAAGAAACAAUCACACCGUGGAACUUCGAAGAAGUC |
| | | GUCGACAAGGGAGCAAGCGCACAGAGCUUCAUCGAAAGAAUGACAAACUUCGACAAGAACCUGCCGAAC |
| | | GAAAAGGUCCUGCCGAAGCACAGCCUGCUGUACGAAUACUUCACAGUCUACAACGAACUGACAAAGGUC |
| | | AAGUACGUCACAGAAGGAAUGAGAAAGCCGGCAUUCCUGAGCGGAGAACAGAAGAAGGCAAUCGUCGAC |
| | | CUGCUGUUCAAGACAAACAGAAAGGUCACAGUCAAGCAGCUGAAGGAAGACUACUUCAAGAAGAUCGAA |
| | | UGCUUCGACAGCGUCGAAAUCAGCGGAGUCGAAGACAGAUUCAACGCAAGCCUGGGAACAUACCACGAC |
| | | CUGCUGAAGAUCAUCAAGGACAAGGACUUCCUGGACAACGAAGAAAACGAAGACAUCCUGGAAGACAUC |
| | | GUCCUGACACUGACACUGUUCGAAGACAGAGAAAUGAUCGAAGAAAGACUGAAGACAUACGCACACCUG |
| | | UUCGACGACAAGGUCAUGAAGCAGCUGAAGAGAAGAAGAUACACAGGAUGGGGAAGACUGAGCAGAAAG |
| | | CUGAUCAACGGAAUCAGAGACAAGCAGAGCGGAAAGACAAUCCUGGACUUCCUGAAGAGCGACGGAUUC |
| | | GCAAACAGAAACUUCAUGCAGCUGAUCCACGACGACAGCCUGACAUUCAAGGAAGACAUCCAGAAGGCA |
| | | CAGGUCAGCGGACAGGGAGACAGCCUGCACGAACACAUCGCAAACCUGGCAGGAAGCCCGGCAAUCAAG |
| | | AAGGGAAUCCUGCAGACAGUCAAGGUCGUCGACGAACUGGUCAAGGUCAUGGGAAGACACAAGCCGGAA |
| | | AACAUCGUCAUCGAAAUGGCAAGAGAAAACCAGACAACACAGAAGGGACAGAAGAACAGCAGAGAAAGA |
| | | AUGAAGAGAAUCGAAGAAGGAAUCAAGGAACUGGGAAGCCAGAUCCUGAAGGAACACCCGGUCGAAAAC |
| | | ACACAGCUGCAGAACGAAAAGCUGUACCUGUACUACCUGCAGAACGGAAGAGACAUGUACGUCGACCAG |
| | | GAACUGGACAUCAACAGACUGAGCGACUACGACGUCGACCACAUCGUCCCGCAGAGCUUCCUGAAGGACG |
| | | ACAGCAUCGACAACAAGGUCCUGACAAGAAGCGACAAGAACAGAGGAAAGAGCGACAACGUCCCGAGCG |
| | | AAGAAGUCGUCAAGAAGAUGAAGAACUACUGGAGACAGCUGCUGAACGCAAAGCUGAUCACACAGAGAA |
| | | AGUUCGACAACCUGACAAAGGCAGAGAGAGGAGGACUGAGCGAACUGGACAAGGCAGGAUUCAUCAAGA |
| | | GACAGCUGGUCGAAACAAGACAGAUCACAAAGCACGUCGCACAGAUCCUGGACAGCAGAAUGAACACAA |
| | | AGUACGACGAAAACGACAAGCUGAUCAGAGAAGUCAAGGUCAUCACACUGAAGAGCAAGCUGGUCAGCG |
| | | ACUUCAGAAAGGACUUCCAGUUCUACAAGGUCAGAGAAAUCAACAACUACCACCACGCACACGACGCAU |
| | | ACCUGAACGCAGUCGUCGGAACAGCACUGAUCAAGAAGUACCCGAAGCUGGAAAGCGAAUUCGUCUACG |
| | | GAGACUACAAGGUCUACGACGUCAGAAAGAUGAUCGCAAAGAGCGAACAGGAAAUCGGAAAGGCAACAG |
| | | CAAAGUACUUCUUCUACAGCAACAUCAUGAACUUCUUCAAGACAGAAAUCACACUGGCAAACGGAGAAA |
| | | UCAGAAAGAGACCGCUGAUCGAAACAAACGGAGAAACAGGAGAAAUCGUCUGGGACAAGGGAAGAGACU |
| | | UCGCAACAGUCAGAAAGGUCCUGAGCAUGCCGCAGGUCAACAUCGUCAAGAAGACAGAAGUCCAGACAG |
| | | GAGGAUUCAGCAAGGAAAGCAUCCUGCCGAAGAGAAACAGCGACAAGCUGAUCGCAAGAAAGAAGGACU |
| | | GGGACCCGAAGAAGUACGGAGGAUUCGACAGCCCGACAGUCGCAUACAGCGUCCUGGUCGUCGCAAAGG |
| | | UCGAAAAGGGAAAGAGCAAGAAGCUGAAGAGCGUCAAGGAACUGCUGGGAAUCACAAUCAUGGAAAGAA |
| | | GCAGCUUCGAAAAGAACCCGAUCGACUUCCUGGAAGCAAAGGGAUACAAGGAAGUCAAGAAGGACCUGA |
| | | UCAUCAAGCUGCCGAAGUACAGCCUGUUCGAACUGGAAAACGGAAGAAAGAGAAUGCUGGCAAGCGCAG |
| | | GAGAACUGCAGAAGGGAAACGAACUGGCACUGCCGAGCAAGUACGUCAACUUCCUGUACCUGGCAAGCC |
| | | ACUACGAAAAGCUGAAGGGAAGCCCGGAAGACAACGAACAGAAGCAGCUGUUCGUCGAACAGCACAAGC |
| | | ACUACCUGGACGAAAUCAUCGAACAGAUCAGCGAAUUCAGCAAGAGAGUCAUCCUGGCAGACGCAAACC |
| | | UGGACAAGGUCCUGAGCGCAUACAACAAGCACAGAGACAAGCCGAUCAGAGAACAGGCAGAAAACAUCA |
| | | UCCACCUGUUCACACUGACAAACCUGGGAGCACCGGCAGCAUUCAAGUACUUCGACACAACAAUCGACAG |
| | | AAAGAGAUACACAAGCACAAAGGAAGUCCUGGACGCAACACUGAUCCACCAGAGCAUCACAGGACUGUA |
| | | CGAAACAAGAAUCGACCUGAGCCAGCUGGGAGGAGACGGAGGAGGAAGCCCGAAGAAGAAGAGAAAGGU |
| | | CUAGCUAGCCAUCACAUUUAAAAGCAUCUCAGCCUACCAUGAGAAUAAGAGAAAGAAAAUGAAGAUCAA |
| | | UAGCUUAUUCAUCUCUUUUUCUUUUUCGUUGGUGUAAAGCCAACACCCUGUCUAAAAAACAUAAAUUUC |
| | | UUUAAUCAUUUUGCCUCUUUUCUCUGUGCUUCAAUUAAUAAAAAAUGGAAAGAACCUCGAGAAAAAAAA |
| | | AAAAAAAAAAAAAAAAAAAAAAAAAAAAAAAAAAAAAAAAAAAAAAAAAAAAAAAAAAAAAAAAAAAA |
| | | AAAAAAAAAAAAAA |
| 1100 | Cas9 mRNA sequence | GGGUCCCGCAGUCGGCGUCCAGCGGCUCUGCUUGUUCGUGUGUGUGUCGUUGCAGGCCUUAUUCGGAUC |
| | | CAUGGAUAAGAAGUACUCAAUCGGGCUGGAUAUCGGAACUAAUUCCGUGGGUUGGGCAGUGAUCACGGA |
| | | UGAAUACAAAGUGCCGUCCAAGAAGUUCAAGGUCCUGGGGAACACCGAUAGACACAGCAUCAAGAAAAA |
| | | UCUCAUCGGAGCCCUGCUGUUUGACUCCGGCGAAACCGCAGAAGCGACCCGGCUCAAACGUACCGCGAGG |
| | | CGACGCUACACCCGGCGGAAGAAUCGCAUCUGCUAUCUGCAAGAGAUCUUUUCGAACGAAAUGGCAAAG |
| | | GUCGACGACAGCUUCUUCCACCGCCUGGAAGAAUCUUUCCUGGUGGAGGAGGACAAGAAGCAUGAACGG |
| | | CAUCCUAUCUUUGGAAACAUCGUCGACGAAGUGGCGUACCACGAAAAGUACCCGACCAUCUACCAUCUGC |
| | | GGAAGAAGUUGGUUGACUCAACUGACAAGGCCGACCUCAGAUUGAUCUACUUGGCCCUCGCCCAUAUGA |
| | | UCAAAUUCCGCGGACACUUCCUGAUCGAAGGCGAUCUGAACCCUGAUAACUCCGACGUGGAUAAGCUUU |
| | | UCAUUCAACUGGUGCAGACCUACAACCAACUGUUCGAAGAAAACCCAAUCAAUGCUAGCGGCGUCGAUG |
| | | CCAAGGCCAUCCUGUCCGCCCGGCUGUCGAAGUCGCGGCGCCUCGAAAACCUGAUCGCACAGCUGCCGGG |
| | | AGAGAAAAAGAACGGACUUUUCGGCAACUUGAUCGCUCUCUCACUGGGACUCACUCCCAAUUUCAAGUC |
| | | CAAUUUUGACCUGGCCGAGGACGCGAAGCUGCAACUCUCAAAGGACACCUACGACGACGACUUGGACAA |
| | | UUUGCUGGCACAAAUUGGCGAUCAGUACGCGGAUCUGUUCCUUGCCGCUAAGAACCUUUCGGACGCAAU |
| | | CUUGCUGUCCGAUAUCCUGCGCGUGAACACCGAAAUAACCAAAGCGCCGCUUAGCGCCUCGAUGAUUAA |
| | | GCGGUACGACGAGCAUCACCAGGAUCUCACGCUGCUCAAAGCGCUCGUGAGACAGCAACUGCCUGAAAA |
| | | GUACAAGGAGAUCUUCUUCGACCAGUCCAAGAAUGGGUACGCAGGGUACAUCGAUGGAGGCGCUAGCCA |
| | | GGAAGAGUUCUAUAAGUUCAUCAAGCCAAUCCUGGAAAAGAUGGACGGAACCGAAGAACUGCUGGUCAA |
| | | GCUGAACAGGGAGGAUCUGCUCCGGAAACAGAGAACCUUUGACAACGGAUCCAUUCCCCACCAGAUCCA |
| | | UCUGGGUGAGCUGCACGCCAUCUUGCGGCGCCAGGAGGACUUUUACCCAUUCCUCAAGGACAACCGGGA |
| | | AAAGAUCGAGAAAAUUCUGACGUUCCGCAUCCCGUAUUACGUGGGCCCACUGGCGCGCGGCAAUUCGCG |
| | | CUUCGCGUGGAUGACUAGAAAAUCAGAGGAAACCAUCACUCCUUGGAAUUUCGAGGAAGUUGUGGAUAA |
| | | GGGAGCUUCGGCACAAAGCUUCAUCGAACGAAUGACCAACUUCGACAAGAAUCUCCCAAACGAGAAGGU |
| | | GCUUCCUAAGCACAGCCUCCUUUACGAAUACUUCACUGUCUACAACGAACUGACUAAAGUGAAAUACGU |
| | | UACUGAAGGAAUGAGGAAGCCGGCCUUUCUGUCCGGAGAACAGAAGAAAGCAAUUGUCGAUCUGCUGUU |
| | | CAAGACCAACCGCAAGGUGACCGUCAAGCAGCUUAAAGAGGACUACUUCAAGAAGAUCGAGUGUUUCGA |
| | | CUCAGUGGAAAUCAGCGGGGUGGAGGACAGAUUCAACGCUUCGCUGGGAACCUAUCAUGAUCUCCUGAA |
| | | GAUCAUCAAGGACAAGGACUUCCUUGACAACGAGGAGAACGAGGACAUCCUGGAAGAUAUCGUCCUGAC |
| | | CUUGACCCUUUUCGAGGAUCGCGAGAUGAUCGAGGAGAGGCUUAAGACCUACGCUCAUCUCUUCGACGA |
| | | UAAGGUCAUGAAACAACUCAAGCGCCGCCGGUACACUGGUUGGGGCCGCCUCUCCCGCAAGCUGAUCAAC |
| | | GGUAUUCGCGAUAAACAGAGCGGUAAAACUAUCCUGGAUUUCCUCAAAUCGGAUGGCUUCGCUAAUCGU |
| | | AACUUCAUGCAAUUGAUCCACGACGACAGCCUGACCUUUAAGGAGGACAUCCAAAAAGCACAAGUGUCC |
| | | GGACAGGGAGACUCACUCCAUGAACACAUCGCGAAUCUGGCCGGUUCGCCGGCGAUUAAGAAGGGAAUU |
| | | CUGCAAACUGUGAAGGUGGUCGACGAGCUGGUGAAGGUCAUGGGACGGCACAAACCGGAGAAUAUCGUG |
| | | AUUGAAAUGGCCCGAGAAAACCAGACUACCCAGAAGGGCCAGAAAAACUCCCGCGAAAGGAUGAAGCGG |
| | | AUCGAAGAAGGAAUCAAGGAGCUGGGCAGCCAGAUCCUGAAAGAGCACCCGGUGGAAAACACGCAGCUG |
| | | CAGAACGAGAAGCUCUACCUGUACUAUUUGCAAAAUGGACGGGACAUGUACGUGGACCAAGAGCUGGAC |
| | | AUCAAUCGGUUGUCUGAUUACGACGUGGACCACAUCGUUCCACAGUCCUUUCUGAAGGAUGACUCGAUC |
| | | GAUAACAAGGUGUUGACUCGCAGCGACAAGAACAGAGGGAAGUCAGAUAAUGUGCCAUCGGAGGAGGUC |
| | | GUGAAGAAGAUGAAGAAUUACUGGCGGCAGCUCCUGAAUGCGAAGCUGAUUACCCAGAGAAAGUUUGAC |
| | | AAUCUCACUAAAGCCGAGCGCGGCGGACUCUCAGAGCUGGAUAAGGCUGGAUUCAUCAAACGGCAGCUG |
| | | GUCGAGACUCGGCAGAUUACCAAGCACGUGGCGCAGAUCUUGGACUCCCGCAUGAACACUAAAUACGAC |
| | | GAGAACGAUAAGCUCAUCCGGGAAGUGAAGGUGAUUACCCUGAAAAGCAAACUUGUGUCGGACUUUCGG |
| | | AAGGACUUUCAGUUUUACAAAGUGAGAGAAAUCAACAACUACCAUCACGCGCAUGACGCAUACCUCAAC |
| | | GCUGUGGUCGGUACCGCCCUGAUCAAAAAGUACCCUAAACUUGAAUCGGAGUUUGUGUACGGAGACUAC |
| | | AAGGUCUACGACGUGAGGAAGAUGAUAGCCAAGUCCGAACAGGAAAUCGGGAAAGCAACUGCGAAAUAC |
| | | UUCUUUUACUCAAACAUCAUGAACUUUUUCAAGACUGAAAUUACGCUGGCCAAUGGAGAAAUCAGGAAG |
| | | AGGCCACUGAUCGAAACUAACGGAGAAACGGGCGAAAUCGUGUGGGACAAGGGCAGGGACUUCGCAACU |
| | | GUUCGCAAAGUGCUCUCUAUGCCGCAAGUCAAUAUUGUGAAGAAAACCGAAGUGCAAACCGGCGGAUUU |
| | | UCAAAGGAAUCGAUCCUCCCAAAGAGAAAUAGCGACAAGCUCAUUGCACGCAAGAAAGACUGGGACCCG |
| | | AAGAAGUACGGAGGAUUCGAUUCGCCGACUGUCGCAUACUCCGUCCUCGUGGUGGCCAAGGUGGAGAAG |
| | | GGAAAGAGCAAAAAGCUCAAAUCCGUCAAAGAGCUGCUGGGGAUUACCAUCAUGGAACGAUCCUCGUUC |
| | | GAGAAGAACCCGAUUGAUUUCCUCGAGGCGAAGGGUUACAAGGAGGUGAAGAAGGAUCUGAUCAUCAAA |
| | | CUCCCCAAGUACUCACUGUUCGAACUGGAAAAUGGUCGGAAGCGCAUGCUGGCUUCGGCCGGAGAACUC |
| | | CAAAAAGGAAAUGAGCUGGCCUUGCCUAGCAAGUACGUCAACUUCCUCUAUCUUGCUUCGCACUACGAA |
| | | AAACUCAAAGGGUCACCGGAAGAUAACGAACAGAAGCAGCUUUUCGUGGAGCAGCACAAGCAUUAUCUG |
| | | GAUGAAAUCAUCGAACAAAUCUCCGAGUUUUCAAAGCGCGUGAUCCUCGCCGACGCCAACCUCGACAAA |
| | | GUCCUGUCGGCCUACAAUAAGCAUAGAGAUAAGCCGAUCAGAGAACAGGCCGAGAACAUUAUCCACUUG |
| | | UUCACCCUGACUAACCUGGGAGCCCCAGCCGCCUUCAAGUACUUCGAUACUACUAUCGAUCGCAAAAGAU |
| | | ACACGUCCACCAAGGAAGUUCUGGACGCGACCCUGAUCCACCAAAGCAUCACUGGACUCUACGAAACUAG |
| | | GAUCGAUCUGUCGCAGCUGGGUGGCGAUGGCGGUGGAUCUCCGAAAAAGAAGAGAAAGGUGUAAUGAGC |
| | | UAGCCAUCACAUUUAAAAGCAUCUCAGCCUACCAUGAGAAUAAGAGAAAGAAAAUGAAGAUCAAUAGCU |
| | | UAUUCAUCUCUUUUUCUUUUUCGUUGGUGUAAAGCCAACACCCUGUCUAAAAAACAUAAAUUUCUUUAA |
| | | UCAUUUUGCCUCUUUUCUCUGUGCUUCAAUUAAUAAAAAAUGGAAAGAACCUCGAGAAAAAAAAAAAAA |
| | | AAAAAAAAAAAAAAAAAAAAAAAAAAAAAAAAAAAAAAAAAAAAAAAAAAAAAAAAAAAAAAAAAAAA |
| | | AAAAAAAAA |
| 1101 | DNA coding | GGGTCCCGCAGTCGGCGTCCAGCGGCTCTGCTTGTTCGTGTGTGTGTCGTTGCAGGCCTTATTCGGATCCGCC |
| | sequence for | ACCATGGACAAGAAGTACAGCATCGGACTGGACATCGGAACAAACAGCGTCGGATGGGCAGTCATCACAGA |
| | Cas9 transcript | CGAATACAAGGTCCCGAGCAAGAAGTTCAAGGTCCTGGGAAACACAGACAGACACAGCATCAAGAAGAAC |
| | | CTGATCGGAGCACTGCTGTTCGACAGCGGAGAAACAGCAGAAGCAACAAGACTGAAGAGAACAGCAAGAA |
| | | GAAGATACACAAGAAGAAAGAACAGAATCTGCTACCTGCAGGAAATCTTCAGCAACGAAATGGCAAAGGTC |
| | | GACGACAGCTTCTTCCACAGACTGGAAGAAAGCTTCCTGGTCGAAGAAGACAAGAAGCACGAAAGACACCC |
| | | GATCTTCGGAAACATCGTCGACGAAGTCGCATACCACGAAAAGTACCCGACAATCTACCACCTGAGAAAGA |
| | | AGCTGGTCGACAGCACAGACAAGGCAGACCTGAGACTGATCTACCTGGCACTGGCACACATGATCAAGTTC |
| | | AGAGGACACTTCCTGATCGAAGGAGACCTGAACCCGGACAACAGCGACGTCGACAAGCTGTTCATCCAGCT |
| | | GGTCCAGACATACAACCAGCTGTTCGAAGAAAACCCGATCAACGCAAGCGGAGTCGACGCAAAGGCAATCC |
| | | TGAGCGCAAGACTGAGCAAGAGCAGAAGACTGGAAAACCTGATCGCACAGCTGCCGGGAGAAAAGAAGAA |
| | | CGGACTGTTCGGAAACCTGATCGCACTGAGCCTGGGACTGACACCGAACTTCAAGAGCAACTTCGACCTGGC |
| | | AGAAGACGCAAAGCTGCAGCTGAGCAAGGACACATACGACGACGACCTGGACAACCTGCTGGCACAGATC |
| | | GGAGACCAGTACGCAGACCTGTTCCTGGCAGCAAAGAACCTGAGCGACGCAATCCTGCTGAGCGACATCCT |
| | | GAGAGTCAACACAGAAATCACAAAGGCACCGCTGAGCGCAAGCATGATCAAGAGATACGACGAACACCAC |
| | | CAGGACCTGACACTGCTGAAGGCACTGGTCAGACAGCAGCTGCCGGAAAAGTACAAGGAAATCTTCTTCGA |
| | | CCAGAGCAAGAACGGATACGCAGGATACATCGACGGAGGAGCAAGCCAGGAAGAATTCTACAAGTTCATCA |
| | | AGCCGATCCTGGAAAAGATGGACGGAACAGAAGAACTGCTGGTCAAGCTGAACAGAGAAGACCTGCTGAG |
| | | AAAGCAGAGAACATTCGACAACGGAAGCATCCCGCACCAGATCCACCTGGGAGAACTGCACGCAATCCTGA |
| | | GAAGACAGGAAGACTTCTACCCGTTCCTGAAGGACAACAGAGAAAAGATCGAAAAGATCCTGACATTCAGA |
| | | ATCCCGTACTACGTCGGACCGCTGGCAAGAGGAAACAGCAGATTCGCATGGATGACAAGAAAGAGCGAAGA |
| | | AACAATCACACCGTGGAACTTCGAAGAAGTCGTCGACAAGGGAGCAAGCGCACAGAGCTTCATCGAAAGAA |
| | | TGACAAACTTCGACAAGAACCTGCCGAACGAAAAGGTCCTGCCGAAGCACAGCCTGCTGTACGAATACTTC |
| | | ACAGTCTACAACGAACTGACAAAGGTCAAGTACGTCACAGAAGGAATGAGAAAGCCGGCATTCCTGAGCGG |
| | | AGAACAGAAGAAGGCAATCGTCGACCTGCTGTTCAAGACAAACAGAAAGGTCACAGTCAAGCAGCTGAAG |
| | | GAAGACTACTTCAAGAAGATCGAATGCTTCGACAGCGTCGAAATCAGCGGAGTCGAAGACAGATTCAACGC |
| | | AAGCCTGGGAACATACCACGACCTGCTGAAGATCATCAAGGACAAGGACTTCCTGGACAACGAAGAAAACG |
| | | AAGACATCCTGGAAGACATCGTCCTGACACTGACACTGTTCGAAGACAGAGAAATGATCGAAGAAAGACTG |
| | | AAGACATACGCACACCTGTTCGACGACAAGGTCATGAAGCAGCTGAAGAGAAGAAGATACACAGGATGGG |
| | | GAAGACTGAGCAGAAAGCTGATCAACGGAATCAGAGACAAGCAGAGCGGAAAGACAATCCTGGACTTCCT |
| | | GAAGAGCGACGGATTCGCAAACAGAAACTTCATGCAGCTGATCCACGACGACAGCCTGACATTCAAGGAAG |
| | | ACATCCAGAAGGCACAGGTCAGCGGACAGGGAGACAGCCTGCACGAACACATCGCAAACCTGGCAGGAAG |
| | | CCCGGCAATCAAGAAGGGAATCCTGCAGACAGTCAAGGTCGTCGACGAACTGGTCAAGGTCATGGGAAGAC |
| | | ACAAGCCGGAAAACATCGTCATCGAAATGGCAAGAGAAAACCAGACAACACAGAAGGGACAGAAGAACAG |
| | | CAGAGAAAGAATGAAGAGAATCGAAGAAGGAATCAAGGAACTGGGAAGCCAGATCCTGAAGGAACACCCG |
| | | GTCGAAAACACACAGCTGCAGAACGAAAAGCTGTACCTGTACTACCTGCAGAACGGAAGAGACATGTACGT |
| | | CGACCAGGAACTGGACATCAACAGACTGAGCGACTACGACGTCGACCACATCGTCCCGCAGAGCTTCCTGA |
| | | AGGACGACAGCATCGACAACAAGGTCCTGACAAGAAGCGACAAGAACAGAGGAAAGAGCGACAACGTCCC |
| | | GAGCGAAGAAGTCGTCAAGAAGATGAAGAACTACTGGAGACAGCTGCTGAACGCAAAGCTGATCACACAG |
| | | AGAAAGTTCGACAACCTGACAAAGGCAGAGAGAGGAGGACTGAGCGAACTGGACAAGGCAGGATTCATCA |
| | | AGAGACAGCTGGTCGAAACAAGACAGATCACAAAGCACGTCGCACAGATCCTGGACAGCAGAATGAACAC |
| | | AAAGTACGACGAAAACGACAAGCTGATCAGAGAAGTCAAGGTCATCACACTGAAGAGCAAGCTGGTCAGC |
| | | GACTTCAGAAAGGACTTCCAGTTCTACAAGGTCAGAGAAATCAACAACTACCACCACGCACACGACGCATA |
| | | CCTGAACGCAGTCGTCGGAACAGCACTGATCAAGAAGTACCCGAAGCTGGAAAGCGAATTCGTCTACGGAG |
| | | ACTACAAGGTCTACGACGTCAGAAAGATGATCGCAAAGAGCGAACAGGAAATCGGAAAGGCAACAGCAAA |
| | | GTACTTCTTCTACAGCAACATCATGAACTTCTTCAAGACAGAAATCACACTGGCAAACGGAGAAATCAGAAA |
| | | GAGACCGCTGATCGAAACAAACGGAGAAACAGGAGAAATCGTCTGGGACAAGGGAAGAGACTTCGCAACA |
| | | GTCAGAAAGGTCCTGAGCATGCCGCAGGTCAACATCGTCAAGAAGACAGAAGTCCAGACAGGAGGATTCAG |
| | | CAAGGAAAGCATCCTGCCGAAGAGAAACAGCGACAAGCTGATCGCAAGAAAGAAGGACTGGGACCCGAAG |
| | | AAGTACGGAGGATTCGACAGCCCGACAGTCGCATACAGCGTCCTGGTCGTCGCAAAGGTCGAAAAGGGAAA |
| | | GAGCAAGAAGCTGAAGAGCGTCAAGGAACTGCTGGGAATCACAATCATGGAAAGAAGCAGCTTCGAAAAG |
| | | AACCCGATCGACTTCCTGGAAGCAAAGGGATACAAGGAAGTCAAGAAGGACCTGATCATCAAGCTGCCGAA |
| | | GTACAGCCTGTTCGAACTGGAAAACGGAAGAAAGAGAATGCTGGCAAGCGCAGGAGAACTGCAGAAGGGA |
| | | AACGAACTGGCACTGCCGAGCAAGTACGTCAACTTCCTGTACCTGGCAAGCCACTACGAAAAGCTGAAGGG |
| | | AAGCCCGGAAGACAACGAACAGAAGCAGCTGTTCGTCGAACAGCACAAGCACTACCTGGACGAAATCATCG |
| | | AACAGATCAGCGAATTCAGCAAGAGAGTCATCCTGGCAGACGCAAACCTGGACAAGGTCCTGAGCGCATAC |
| | | AACAAGCACAGAGACAAGCCGATCAGAGAACAGGCAGAAAACATCATCCACCTGTTCACACTGACAAACCT |
| | | GGGAGCACCGGCAGCATTCAAGTACTTCGACACAACAATCGACAGAAAGAGATACACAAGCACAAAGGAA |
| | | GTCCTGGACGCAACACTGATCCACCAGAGCATCACAGGACTGTACGAAACAAGAATCGACCTGAGCCAGCT |
| | | GGGAGGAGACGGAGGAGGAAGCCCGAAGAAGAAGAGAAAGGTCTAGCTAGCCATCACATTTAAAAGCATC |
| | | TCAGCCTACCATGAGAATAAGAGAAAGAAAATGAAGATCAATAGCTTATTCATCTCTTTTTCTTTTTCGTTGG |
| | | TGTAAAGCCAACACCCTGTCTAAAAAACATAAATTTCTTTAATCATTTTGCCTCTTTTCTCTGTGCTTCAATT |
| | | AATAAAAAATGGAAAGAACCTCGAG |
| 1102 | Cas9 DNA | ATGGACAAGAAGTACAGCATCGGACTGGACATCGGAACAAACAGCGTCGGATGGGCAGTCATCACAGACGA |
| | coding sequence | ATACAAGGTCCCGAGCAAGAAGTTCAAGGTCCTGGGAAACACAGACAGACACAGCATCAAGAAGAACCTG |
| | | ATCGGAGCACTGCTGTTCGACAGCGGAGAAACAGCAGAAGCAACAAGACTGAAGAGAACAGCAAGAAGAA |
| | | GATACACAAGAAGAAAGAACAGAATCTGCTACCTGCAGGAAATCTTCAGCAACGAAATGGCAAAGGTCGAC |
| | | GACAGCTTCTTCCACAGACTGGAAGAAAGCTTCCTGGTCGAAGAAGACAAGAAGCACGAAAGACACCCGAT |
| | | CTTCGGAAACATCGTCGACGAAGTCGCATACCACGAAAAGTACCCGACAATCTACCACCTGAGAAAGAAGC |
| | | TGGTCGACAGCACAGACAAGGCAGACCTGAGACTGATCTACCTGGCACTGGCACACATGATCAAGTTCAGA |
| | | GGACACTTCCTGATCGAAGGAGACCTGAACCCGGACAACAGCGACGTCGACAAGCTGTTCATCCAGCTGGT |
| | | CCAGACATACAACCAGCTGTTCGAAGAAAACCCGATCAACGCAAGCGGAGTCGACGCAAAGGCAATCCTGA |
| | | GCGCAAGACTGAGCAAGAGCAGAAGACTGGAAAACCTGATCGCACAGCTGCCGGGAGAAAAGAAGAACGG |
| | | ACTGTTCGGAAACCTGATCGCACTGAGCCTGGGACTGACACCGAACTTCAAGAGCAACTTCGACCTGGCAG |
| | | AAGACGCAAAGCTGCAGCTGAGCAAGGACACATACGACGACGACCTGGACAACCTGCTGGCACAGATCGG |
| | | AGACCAGTACGCAGACCTGTTCCTGGCAGCAAAGAACCTGAGCGACGCAATCCTGCTGAGCGACATCCTGA |
| | | GAGTCAACACAGAAATCACAAAGGCACCGCTGAGCGCAAGCATGATCAAGAGATACGACGAACACCACCA |
| | | GGACCTGACACTGCTGAAGGCACTGGTCAGACAGCAGCTGCCGGAAAAGTACAAGGAAATCTTCTTCGACC |
| | | AGAGCAAGAACGGATACGCAGGATACATCGACGGAGGAGCAAGCCAGGAAGAATTCTACAAGTTCATCAA |
| | | GCCGATCCTGGAAAAGATGGACGGAACAGAAGAACTGCTGGTCAAGCTGAACAGAGAAGACCTGCTGAGA |
| | | AAGCAGAGAACATTCGACAACGGAAGCATCCCGCACCAGATCCACCTGGGAGAACTGCACGCAATCCTGAG |
| | | AAGACAGGAAGACTTCTACCCGTTCCTGAAGGACAACAGAGAAAAGATCGAAAAGATCCTGACATTCAGAA |
| | | TCCCGTACTACGTCGGACCGCTGGCAAGAGGAAACAGCAGATTCGCATGGATGACAAGAAAGAGCGAAGAA |
| | | ACAATCACACCGTGGAACTTCGAAGAAGTCGTCGACAAGGGAGCAAGCGCACAGAGCTTCATCGAAAGAAT |
| | | GACAAACTTCGACAAGAACCTGCCGAACGAAAAGGTCCTGCCGAAGCACAGCCTGCTGTACGAATACTTCA |
| | | CAGTCTACAACGAACTGACAAAGGTCAAGTACGTCACAGAAGGAATGAGAAAGCCGGCATTCCTGAGCGGA |
| | | GAACAGAAGAAGGCAATCGTCGACCTGCTGTTCAAGACAAACAGAAAGGTCACAGTCAAGCAGCTGAAGG |
| | | AAGACTACTTCAAGAAGATCGAATGCTTCGACAGCGTCGAAATCAGCGGAGTCGAAGACAGATTCAACGCA |
| | | AGCCTGGGAACATACCACGACCTGCTGAAGATCATCAAGGACAAGGACTTCCTGGACAACGAAGAAAACGA |
| | | AGACATCCTGGAAGACATCGTCCTGACACTGACACTGTTCGAAGACAGAGAAATGATCGAAGAAAGACTGA |
| | | AGACATACGCACACCTGTTCGACGACAAGGTCATGAAGCAGCTGAAGAGAAGAAGATACACAGGATGGGG |
| | | AAGACTGAGCAGAAAGCTGATCAACGGAATCAGAGACAAGCAGAGCGGAAAGACAATCCTGGACTTCCTG |
| | | AAGAGCGACGGATTCGCAAACAGAAACTTCATGCAGCTGATCCACGACGACAGCCTGACATTCAAGGAAGA |
| | | CATCCAGAAGGCACAGGTCAGCGGACAGGGAGACAGCCTGCACGAACACATCGCAAACCTGGCAGGAAGC |
| | | CCGGCAATCAAGAAGGGAATCCTGCAGACAGTCAAGGTCGTCGACGAACTGGTCAAGGTCATGGGAAGACA |
| | | CAAGCCGGAAAACATCGTCATCGAAATGGCAAGAGAAAACCAGACAACACAGAAGGGACAGAAGAACAGC |
| | | AGAGAAAGAATGAAGAGAATCGAAGAAGGAATCAAGGAACTGGGAAGCCAGATCCTGAAGGAACACCCGG |
| | | TCGAAAACACACAGCTGCAGAACGAAAAGCTGTACCTGTACTACCTGCAGAACGGAAGAGACATGTACGTC |
| | | GACCAGGAACTGGACATCAACAGACTGAGCGACTACGACGTCGACCACATCGTCCCGCAGAGCTTCCTGAA |
| | | GGACGACAGCATCGACAACAAGGTCCTGACAAGAAGCGACAAGAACAGAGGAAAGAGCGACAACGTCCCG |
| | | AGCGAAGAAGTCGTCAAGAAGATGAAGAACTACTGGAGACAGCTGCTGAACGCAAAGCTGATCACACAGA |
| | | GAAAGTTCGACAACCTGACAAAGGCAGAGAGAGGAGGACTGAGCGAACTGGACAAGGCAGGATTCATCAA |
| | | GAGACAGCTGGTCGAAACAAGACAGATCACAAAGCACGTCGCACAGATCCTGGACAGCAGAATGAACACA |
| | | AAGTACGACGAAAACGACAAGCTGATCAGAGAAGTCAAGGTCATCACACTGAAGAGCAAGCTGGTCAGCG |
| | | ACTTCAGAAAGGACTTCCAGTTCTACAAGGTCAGAGAAATCAACAACTACCACCACGCACACGACGCATAC |
| | | CTGAACGCAGTCGTCGGAACAGCACTGATCAAGAAGTACCCGAAGCTGGAAAGCGAATTCGTCTACGGAGA |
| | | CTACAAGGTCTACGACGTCAGAAAGATGATCGCAAAGAGCGAACAGGAAATCGGAAAGGCAACAGCAAAG |
| | | TACTTCTTCTACAGCAACATCATGAACTTCTTCAAGACAGAAATCACACTGGCAAACGGAGAAATCAGAAAG |
| | | AGACCGCTGATCGAAACAAACGGAGAAACAGGAGAAATCGTCTGGGACAAGGGAAGAGACTTCGCAACAG |
| | | TCAGAAAGGTCCTGAGCATGCCGCAGGTCAACATCGTCAAGAAGACAGAAGTCCAGACAGGAGGATTCAGC |
| | | AAGGAAAGCATCCTGCCGAAGAGAAACAGCGACAAGCTGATCGCAAGAAAGAAGGACTGGGACCCGAAGA |
| | | AGTACGGAGGATTCGACAGCCCGACAGTCGCATACAGCGTCCTGGTCGTCGCAAAGGTCGAAAAGGGAAAG |
| | | AGCAAGAAGCTGAAGAGCGTCAAGGAACTGCTGGGAATCACAATCATGGAAAGAAGCAGCTTCGAAAAGA |
| | | ACCCGATCGACTTCCTGGAAGCAAAGGGATACAAGGAAGTCAAGAAGGACCTGATCATCAAGCTGCCGAAG |
| | | TACAGCCTGTTCGAACTGGAAAACGGAAGAAAGAGAATGCTGGCAAGCGCAGGAGAACTGCAGAAGGGAA |
| | | ACGAACTGGCACTGCCGAGCAAGTACGTCAACTTCCTGTACCTGGCAAGCCACTACGAAAAGCTGAAGGGA |
| | | AGCCCGGAAGACAACGAACAGAAGCAGCTGTTCGTCGAACAGCACAAGCACTACCTGGACGAAATCATCGA |
| | | ACAGATCAGCGAATTCAGCAAGAGAGTCATCCTGGCAGACGCAAACCTGGACAAGGTCCTGAGCGCATACA |
| | | ACAAGCACAGAGACAAGCCGATCAGAGAACAGGCAGAAAACATCATCCACCTGTTCACACTGACAAACCTG |
| | | GGAGCACCGGCAGCATTCAAGTACTTCGACACAACAATCGACAGAAAGAGATACACAAGCACAAAGGAAG |
| | | TCCTGGACGCAACACTGATCCACCAGAGCATCACAGGACTGTACGAAACAAGAATCGACCTGAGCCAGCTG |
| | | GGAGGAGACGGAGGAGGAAGCCCGAAGAAGAAGAGAAAGGTCTAG |
| 1103 | Cas9 DNA coding | ATGGATAAGAAGTACTCAATCGGGCTGGATATCGGAACTAATTCCGTGGGTTGGGCAGTGATCACGGATGA |
| | sequence 1 | ATACAAAGTGCCGTCCAAGAAGTTCAAGGTCCTGGGGAACACCGATAGACACAGCATCAAGAAAAATCTCA |
| | | TCGGAGCCCTGCTGTTTGACTCCGGCGAAACCGCAGAAGCGACCCGGCTCAAACGTACCGCGAGGCGACGC |
| | | TACACCCGGCGGAAGAATCGCATCTGCTATCTGCAAGAGATCTTTTCGAACGAAATGGCAAAGGTCGACGA |
| | | CAGCTTCTTCCACCGCCTGGAAGAATCTTTCCTGGTGGAGGAGGACAAGAAGCATGAACGGCATCCTATCTT |
| | | TGGAAACATCGTCGACGAAGTGGCGTACCACGAAAAGTACCCGACCATCTACCATCTGCGGAAGAAGTTGG |
| | | TTGACTCAACTGACAAGGCCGACCTCAGATTGATCTACTTGGCCCTCGCCCATATGATCAAATTCCGCGGAC |
| | | ACTTCCTGATCGAAGGCGATCTGAACCCTGATAACTCCGACGTGGATAAGCTTTTCATTCAACTGGTGCAGA |
| | | CCTACAACCAACTGTTCGAAGAAAACCCAATCAATGCTAGCGGCGTCGATGCCAAGGCCATCCTGTCCGCCC |
| | | GGCTGTCGAAGTCGCGGCGCCTCGAAAACCTGATCGCACAGCTGCCGGGAGAGAAAAAGAACGGACTTTTC |
| | | GGCAACTTGATCGCTCTCTCACTGGGACTCACTCCCAATTTCAAGTCCAATTTTGACCTGGCCGAGGACGCG |
| | | AAGCTGCAACTCTCAAAGGACACCTACGACGACGACTTGGACAATTTGCTGGCACAAATTGGCGATCAGTAC |
| | | GCGGATCTGTTCCTTGCCGCTAAGAACCTTTCGGACGCAATCTTGCTGTCCGATATCCTGCGCGTGAACACCG |
| | | AAATAACCAAAGCGCCGCTTAGCGCCTCGATGATTAAGCGGTACGACGAGCATCACCAGGATCTCACGCTG |
| | | CTCAAAGCGCTCGTGAGACAGCAACTGCCTGAAAAGTACAAGGAGATCTTCTTCGACCAGTCCAAGAATGG |
| | | GTACGCAGGGTACATCGATGGAGGCGCTAGCCAGGAAGAGTTCTATAAGTTCATCAAGCCAATCCTGGAAA |
| | | AGATGGACGGAACCGAAGAACTGCTGGTCAAGCTGAACAGGGAGGATCTGCTCCGGAAACAGAGAACCTTT |
| | | GACAACGGATCCATTCCCCACCAGATCCATCTGGGTGAGCTGCACGCCATCTTGCGGCGCCAGGAGGACTTT |
| | | TACCCATTCCTCAAGGACAACCGGGAAAAGATCGAGAAAATTCTGACGTTCCGCATCCCGTATTACGTGGGC |
| | | CCACTGGCGCGCGGCAATTCGCGCTTCGCGTGGATGACTAGAAAATCAGAGGAAACCATCACTCCTTGGAAT |
| | | TTCGAGGAAGTTGTGGATAAGGGAGCTTCGGCACAAAGCTTCATCGAACGAATGACCAACTTCGACAAGAA |
| | | TCTCCCAAACGAGAAGGTGCTTCCTAAGCACAGCCTCCTTTACGAATACTTCACTGTCTACAACGAACTGAC |
| | | TAAAGTGAAATACGTTACTGAAGGAATGAGGAAGCCGGCCTTTCTGTCCGGAGAACAGAAGAAAGCAATTG |
| | | TCGATCTGCTGTTCAAGACCAACCGCAAGGTGACCGTCAAGCAGCTTAAAGAGGACTACTTCAAGAAGATC |
| | | GAGTGTTTCGACTCAGTGGAAATCAGCGGGGTGGAGGACAGATTCAACGCTTCGCTGGGAACCTATCATGAT |
| | | CTCCTGAAGATCATCAAGGACAAGGACTTCCTTGACAACGAGGAGAACGAGGACATCCTGGAAGATATCGT |
| | | CCTGACCTTGACCCTTTTCGAGGATCGCGAGATGATCGAGGAGAGGCTTAAGACCTACGCTCATCTCTTCGA |
| | | CGATAAGGTCATGAAACAACTCAAGCGCCGCCGGTACACTGGTTGGGGCCGCCTCTCCCGCAAGCTGATCA |
| | | ACGGTATTCGCGATAAACAGAGCGGTAAAACTATCCTGGATTTCCTCAAATCGGATGGCTTCGCTAATCGTA |
| | | ACTTCATGCAATTGATCCACGACGACAGCCTGACCTTTAAGGAGGACATCCAAAAAGCACAAGTGTCCGGA |
| | | CAGGGAGACTCACTCCATGAACACATCGCGAATCTGGCCGGTTCGCCGGCGATTAAGAAGGGAATTCTGCA |
| | | AACTGTGAAGGTGGTCGACGAGCTGGTGAAGGTCATGGGACGGCACAAACCGGAGAATATCGTGATTGAAA |
| | | TGGCCCGAGAAAACCAGACTACCCAGAAGGGCCAGAAAAACTCCCGCGAAAGGATGAAGCGGATCGAAGA |
| | | AGGAATCAAGGAGCTGGGCAGCCAGATCCTGAAAGAGCACCCGGTGGAAAACACGCAGCTGCAGAACGAG |
| | | AAGCTCTACCTGTACTATTTGCAAAATGGACGGGACATGTACGTGGACCAAGAGCTGGACATCAATCGGTTG |
| | | TCTGATTACGACGTGGACCACATCGTTCCACAGTCCTTTCTGAAGGATGACTCGATCGATAACAAGGTGTTG |
| | | ACTCGCAGCGACAAGAACAGAGGGAAGTCAGATAATGTGCCATCGGAGGAGGTCGTGAAGAAGATGAAGA |
| | | ATTACTGGCGGCAGCTCCTGAATGCGAAGCTGATTACCCAGAGAAAGTTTGACAATCTCACTAAAGCCGAGC |
| | | GCGGCGGACTCTCAGAGCTGGATAAGGCTGGATTCATCAAACGGCAGCTGGTCGAGACTCGGCAGATTACC |
| | | AAGCACGTGGCGCAGATCTTGGACTCCCGCATGAACACTAAATACGACGAGAACGATAAGCTCATCCGGGA |
| | | AGTGAAGGTGATTACCCTGAAAAGCAAACTTGTGTCGGACTTTCGGAAGGACTTTCAGTTTTACAAAGTGAG |
| | | AGAAATCAACAACTACCATCACGCGCATGACGCATACCTCAACGCTGTGGTCGGTACCGCCCTGATCAAAA |
| | | AGTACCCTAAACTTGAATCGGAGTTTGTGTACGGAGACTACAAGGTCTACGACGTGAGGAAGATGATAGCC |
| | | AAGTCCGAACAGGAAATCGGGAAAGCAACTGCGAAATACTTCTTTTACTCAAACATCATGAACTTTTTCAAG |
| | | ACTGAAATTACGCTGGCCAATGGAGAAATCAGGAAGAGGCCACTGATCGAAACTAACGGAGAAACGGGCG |
| | | AAATCGTGTGGGACAAGGGCAGGGACTTCGCAACTGTTCGCAAAGTGCTCTCTATGCCGCAAGTCAATATTG |
| | | TGAAGAAAACCGAAGTGCAAACCGGCGGATTTTCAAAGGAATCGATCCTCCCAAAGAGAAATAGCGACAAG |
| | | CTCATTGCACGCAAGAAAGACTGGGACCCGAAGAAGTACGGAGGATTCGATTCGCCGACTGTCGCATACTC |
| | | CGTCCTCGTGGTGGCCAAGGTGGAGAAGGGAAAGAGCAAAAAGCTCAAATCCGTCAAAGAGCTGCTGGGGA |
| | | TTACCATCATGGAACGATCCTCGTTCGAGAAGAACCCGATTGATTTCCTCGAGGCGAAGGGTTACAAGGAGG |
| | | TGAAGAAGGATCTGATCATCAAACTCCCCAAGTACTCACTGTTCGAACTGGAAAATGGTCGGAAGCGCATGC |
| | | TGGCTTCGGCCGGAGAACTCCAAAAAGGAAATGAGCTGGCCTTGCCTAGCAAGTACGTCAACTTCCTCTATC |
| | | TTGCTTCGCACTACGAAAAACTCAAAGGGTCACCGGAAGATAACGAACAGAAGCAGCTTTTCGTGGAGCAG |
| | | CACAAGCATTATCTGGATGAAATCATCGAACAAATCTCCGAGTTTTCAAAGCGCGTGATCCTCGCCGACGCC |
| | | AACCTCGACAAAGTCCTGTCGGCCTACAATAAGCATAGAGATAAGCCGATCAGAGAACAGGCCGAGAACAT |
| | | TATCCACTTGTTCACCCTGACTAACCTGGGAGCCCCAGCCGCCTTCAAGTACTTCGATACTACTATCGATCGC |
| | | AAAAGATACACGTCCACCAAGGAAGTTCTGGACGCGACCCTGATCCACCAAAGCATCACTGGACTCTACGA |
| | | AACTAGGATCGATCTGTCGCAGCTGGGTGGCGATGGCGGTGGATCTCCGAAAAAGAAGAGAAAGGTGTAAT |
| | | GA |
| 1104 | Cas9 mRNA open | AUGGACAAGAAGUACAGCAUCGGACUGGACAUCGGAACAAACAGCGUCGGAUGGGCAGUCAUCACAGAC |
| | reading | GAAUACAAGGUCCCGAGCAAGAAGUUCAAGGUCCUGGGAAACACAGACAGACACAGCAUCAAGAAGAAC |
| | frame (ORF) 2 | CUGAUCGGAGCACUGCUGUUCGACAGCGGAGAAACAGCAGAAGCAACAAGACUGAAGAGAACAGCAAGA |
| | | AGAAGAUACACAAGAAGAAAGAACAGAAUCUGCUACCUGCAGGAAAUCUUCAGCAACGAAAUGGCAAAG |
| | | GUCGACGACAGCUUCUUCCACAGACUGGAAGAAAGCUUCCUGGUCGAAGAAGACAAGAAGCACGAAAGA |
| | | CACCCGAUCUUCGGAAACAUCGUCGACGAAGUCGCAUACCACGAAAAGUACCCGACAAUCUACCACCUGA |
| | | GAAAGAAGCUGGUCGACAGCACAGACAAGGCAGACCUGAGACUGAUCUACCUGGCACUGGCACACAUGA |
| | | UCAAGUUCAGAGGACACUUCCUGAUCGAAGGAGACCUGAACCCGGACAACAGCGACGUCGACAAGCUGU |
| | | UCAUCCAGCUGGUCCAGACAUACAACCAGCUGUUCGAAGAAAACCCGAUCAACGCAAGCGGAGUCGACGC |
| | | AAAGGCAAUCCUGAGCGCAAGACUGAGCAAGAGCAGAAGACUGGAAAACCUGAUCGCACAGCUGCCGGG |
| | | AGAAAAGAAGAACGGACUGUUCGGAAACCUGAUCGCACUGAGCCUGGGACUGACACCGAACUUCAAGAG |
| | | CAACUUCGACCUGGCAGAAGACGCAAAGCUGCAGCUGAGCAAGGACACAUACGACGACGACCUGGACAA |
| | | CCUGCUGGCACAGAUCGGAGACCAGUACGCAGACCUGUUCCUGGCAGCAAAGAACCUGAGCGACGCAAUC |
| | | CUGCUGAGCGACAUCCUGAGAGUCAACACAGAAAUCACAAAGGCACCGCUGAGCGCAAGCAUGAUCAAG |
| | | AGAUACGACGAACACCACCAGGACCUGACACUGCUGAAGGCACUGGUCAGACAGCAGCUGCCGGAAAAG |
| | | UACAAGGAAAUCUUCUUCGACCAGAGCAAGAACGGAUACGCAGGAUACAUCGACGGAGGAGCAAGCCAG |
| | | GAAGAAUUCUACAAGUUCAUCAAGCCGAUCCUGGAAAAGAUGGACGGAACAGAAGAACUGCUGGUCAAG |
| | | CUGAACAGAGAAGACCUGCUGAGAAAGCAGAGAACAUUCGACAACGGAAGCAUCCCGCACCAGAUCCAC |
| | | CUGGGAGAACUGCACGCAAUCCUGAGAAGACAGGAAGACUUCUACCCGUUCCUGAAGGACAACAGAGAA |
| | | AAGAUCGAAAAGAUCCUGACAUUCAGAAUCCCGUACUACGUCGGACCGCUGGCAAGAGGAAACAGCAGA |
| | | UUCGCAUGGAUGACAAGAAAGAGCGAAGAAACAAUCACACCGUGGAACUUCGAAGAAGUCGUCGACAAG |
| | | GGAGCAAGCGCACAGAGCUUCAUCGAAAGAAUGACAAACUUCGACAAGAACCUGCCGAACGAAAAGGUC |
| | | CUGCCGAAGCACAGCCUGCUGUACGAAUACUUCACAGUCUACAACGAACUGACAAAGGUCAAGUACGUC |
| | | ACAGAAGGAAUGAGAAAGCCGGCAUUCCUGAGCGGAGAACAGAAGAAGGCAAUCGUCGACCUGCUGUUC |
| | | AAGACAAACAGAAAGGUCACAGUCAAGCAGCUGAAGGAAGACUACUUCAAGAAGAUCGAAUGCUUCGAC |
| | | AGCGUCGAAAUCAGCGGAGUCGAAGACAGAUUCAACGCAAGCCUGGGAACAUACCACGACCUGCUGAAG |
| | | AUCAUCAAGGACAAGGACUUCCUGGACAACGAAGAAAACGAAGACAUCCUGGAAGACAUCGUCCUGACA |
| | | CUGACACUGUUCGAAGACAGAGAAAUGAUCGAAGAAAGACUGAAGACAUACGCACACCUGUUCGACGAC |
| | | AAGGUCAUGAAGCAGCUGAAGAGAAGAAGAUACACAGGAUGGGGAAGACUGAGCAGAAAGCUGAUCAAC |
| | | GGAAUCAGAGACAAGCAGAGCGGAAAGACAAUCCUGGACUUCCUGAAGAGCGACGGAUUCGCAAACAGA |
| | | AACUUCAUGCAGCUGAUCCACGACGACAGCCUGACAUUCAAGGAAGACAUCCAGAAGGCACAGGUCAGC |
| | | GGACAGGGAGACAGCCUGCACGAACACAUCGCAAACCUGGCAGGAAGCCCGGCAAUCAAGAAGGGAAUC |
| | | CUGCAGACAGUCAAGGUCGUCGACGAACUGGUCAAGGUCAUGGGAAGACACAAGCCGGAAAACAUCGUC |
| | | AUCGAAAUGGCAAGAGAAAACCAGACAACACAGAAGGGACAGAAGAACAGCAGAGAAAGAAUGAAGAGA |
| | | AUCGAAGAAGGAAUCAAGGAACUGGGAAGCCAGAUCCUGAAGGAACACCCGGUCGAAAACACACAGCUG |
| | | CAGAACGAAAAGCUGUACCUGUACUACCUGCAGAACGGAAGAGACAUGUACGUCGACCAGGAACUGGAC |
| | | AUCAACAGACUGAGCGACUACGACGUCGACCACAUCGUCCCGCAGAGCUUCCUGAAGGACGACAGCAUCG |
| | | ACAACAAGGUCCUGACAAGAAGCGACAAGAACAGAGGAAAGAGCGACAACGUCCCGAGCGAAGAAGUCG |
| | | UCAAGAAGAUGAAGAACUACUGGAGACAGCUGCUGAACGCAAAGCUGAUCACACAGAGAAAGUUCGACA |
| | | ACCUGACAAAGGCAGAGAGAGGAGGACUGAGCGAACUGGACAAGGCAGGAUUCAUCAAGAGACAGCUGG |
| | | UCGAAACAAGACAGAUCACAAAGCACGUCGCACAGAUCCUGGACAGCAGAAUGAACACAAAGUACGACG |
| | | AAAACGACAAGCUGAUCAGAGAAGUCAAGGUCAUCACACUGAAGAGCAAGCUGGUCAGCGACUUCAGAA |
| | | AGGACUUCCAGUUCUACAAGGUCAGAGAAAUCAACAACUACCACCACGCACACGACGCAUACCUGAACGC |
| | | AGUCGUCGGAACAGCACUGAUCAAGAAGUACCCGAAGCUGGAAAGCGAAUUCGUCUACGGAGACUACAA |
| | | GGUCUACGACGUCAGAAAGAUGAUCGCAAAGAGCGAACAGGAAAUCGGAAAGGCAACAGCAAAGUACUU |
| | | CUUCUACAGCAACAUCAUGAACUUCUUCAAGACAGAAAUCACACUGGCAAACGGAGAAAUCAGAAAGAG |
| | | ACCGCUGAUCGAAACAAACGGAGAAACAGGAGAAAUCGUCUGGGACAAGGGAAGAGACUUCGCAACAGU |
| | | CAGAAAGGUCCUGAGCAUGCCGCAGGUCAACAUCGUCAAGAAGACAGAAGUCCAGACAGGAGGAUUCAG |
| | | CAAGGAAAGCAUCCUGCCGAAGAGAAACAGCGACAAGCUGAUCGCAAGAAAGAAGGACUGGGACCCGAA |
| | | GAAGUACGGAGGAUUCGACAGCCCGACAGUCGCAUACAGCGUCCUGGUCGUCGCAAAGGUCGAAAAGGG |
| | | AAAGAGCAAGAAGCUGAAGAGCGUCAAGGAACUGCUGGGAAUCACAAUCAUGGAAAGAAGCAGCUUCGA |
| | | AAAGAACCCGAUCGACUUCCUGGAAGCAAAGGGAUACAAGGAAGUCAAGAAGGACCUGAUCAUCAAGCU |
| | | GCCGAAGUACAGCCUGUUCGAACUGGAAAACGGAAGAAAGAGAAUGCUGGCAAGCGCAGGAGAACUGCA |
| | | GAAGGGAAACGAACUGGCACUGCCGAGCAAGUACGUCAACUUCCUGUACCUGGCAAGCCACUACGAAAA |
| | | GCUGAAGGGAAGCCCGGAAGACAACGAACAGAAGCAGCUGUUCGUCGAACAGCACAAGCACUACCUGGA |
| | | CGAAAUCAUCGAACAGAUCAGCGAAUUCAGCAAGAGAGUCAUCCUGGCAGACGCAAACCUGGACAAGGU |
| | | CCUGAGCGCAUACAACAAGCACAGAGACAAGCCGAUCAGAGAACAGGCAGAAAACAUCAUCCACCUGUU |
| | | CACACUGACAAACCUGGGAGCACCGGCAGCAUUCAAGUACUUCGACACAACAAUCGACAGAAAGAGAUA |
| | | CACAAGCACAAAGGAAGUCCUGGACGCAACACUGAUCCACCAGAGCAUCACAGGACUGUACGAAACAAG |
| | | AAUCGACCUGAGCCAGCUGGGAGGAGACGGAGGAGGAAGCCCGAAGAAGAAGAGAAAGGUCUAG |
| 1105 | Cas9 mRNA | AUGGAUAAGAAGUACUCAAUCGGGCUGGAUAUCGGAACUAAUUCCGUGGGUUGGGCAGUGAUCACGGAU |
| | ORF 1 | GAAUACAAAGUGCCGUCCAAGAAGUUCAAGGUCCUGGGGAACACCGAUAGACACAGCAUCAAGAAAAAU |
| | | CUCAUCGGAGCCCUGCUGUUUGACUCCGGCGAAACCGCAGAAGCGACCCGGCUCAAACGUACCGCGAGGC |
| | | GACGCUACACCCGGCGGAAGAAUCGCAUCUGCUAUCUGCAAGAGAUCUUUUCGAACGAAAUGGCAAAGG |
| | | UCGACGACAGCUUCUUCCACCGCCUGGAAGAAUCUUUCCUGGUGGAGGAGGACAAGAAGCAUGAACGGC |
| | | AUCCUAUCUUUGGAAACAUCGUCGACGAAGUGGCGUACCACGAAAAGUACCCGACCAUCUACCAUCUGC |
| | | GGAAGAAGUUGGUUGACUCAACUGACAAGGCCGACCUCAGAUUGAUCUACUUGGCCCUCGCCCAUAUGA |
| | | UCAAAUUCCGCGGACACUUCCUGAUCGAAGGCGAUCUGAACCCUGAUAACUCCGACGUGGAUAAGCUUU |
| | | UCAUUCAACUGGUGCAGACCUACAACCAACUGUUCGAAGAAAACCCAAUCAAUGCUAGCGGCGUCGAUG |
| | | CCAAGGCCAUCCUGUCCGCCCGGCUGUCGAAGUCGCGGCGCCUCGAAAACCUGAUCGCACAGCUGCCGGG |
| | | AGAGAAAAAGAACGGACUUUUCGGCAACUUGAUCGCUCUCUCACUGGGACUCACUCCCAAUUUCAAGUC |
| | | CAAUUUUGACCUGGCCGAGGACGCGAAGCUGCAACUCUCAAAGGACACCUACGACGACGACUUGGACAA |
| | | UUUGCUGGCACAAAUUGGCGAUCAGUACGCGGAUCUGUUCCUUGCCGCUAAGAACCUUUCGGACGCAAU |
| | | CUUGCUGUCCGAUAUCCUGCGCGUGAACACCGAAAUAACCAAAGCGCCGCUUAGCGCCUCGAUGAUUAA |
| | | GCGGUACGACGAGCAUCACCAGGAUCUCACGCUGCUCAAAGCGCUCGUGAGACAGCAACUGCCUGAAAA |
| | | GUACAAGGAGAUCUUCUUCGACCAGUCCAAGAAUGGGUACGCAGGGUACAUCGAUGGAGGCGCUAGCCA |
| | | GGAAGAGUUCUAUAAGUUCAUCAAGCCAAUCCUGGAAAAGAUGGACGGAACCGAAGAACUGCUGGUCAA |
| | | GCUGAACAGGGAGGAUCUGCUCCGGAAACAGAGAACCUUUGACAACGGAUCCAUUCCCCACCAGAUCCA |
| | | UCUGGGUGAGCUGCACGCCAUCUUGCGGCGCCAGGAGGACUUUUACCCAUUCCUCAAGGACAACCGGGA |
| | | AAAGAUCGAGAAAAUUCUGACGUUCCGCAUCCCGUAUUACGUGGGCCCACUGGCGCGCGGCAAUUCGCG |
| | | CUUCGCGUGGAUGACUAGAAAAUCAGAGGAAACCAUCACUCCUUGGAAUUUCGAGGAAGUUGUGGAUAA |
| | | GGGAGCUUCGGCACAAAGCUUCAUCGAACGAAUGACCAACUUCGACAAGAAUCUCCCAAACGAGAAGGU |
| | | GCUUCCUAAGCACAGCCUCCUUUACGAAUACUUCACUGUCUACAACGAACUGACUAAAGUGAAAUACGU |
| | | UACUGAAGGAAUGAGGAAGCCGGCCUUUCUGUCCGGAGAACAGAAGAAAGCAAUUGUCGAUCUGCUGUU |
| | | CAAGACCAACCGCAAGGUGACCGUCAAGCAGCUUAAAGAGGACUACUUCAAGAAGAUCGAGUGUUUCGA |
| | | CUCAGUGGAAAUCAGCGGGGUGGAGGACAGAUUCAACGCUUCGCUGGGAACCUAUCAUGAUCUCCUGAA |
| | | GAUCAUCAAGGACAAGGACUUCCUUGACAACGAGGAGAACGAGGACAUCCUGGAAGAUAUCGUCCUGAC |
| | | CUUGACCCUUUUCGAGGAUCGCGAGAUGAUCGAGGAGAGGCUUAAGACCUACGCUCAUCUCUUCGACGA |
| | | UAAGGUCAUGAAACAACUCAAGCGCCGCCGGUACACUGGUUGGGGCCGCCUCUCCCGCAAGCUGAUCAAC |
| | | GGUAUUCGCGAUAAACAGAGCGGUAAAACUAUCCUGGAUUUCCUCAAAUCGGAUGGCUUCGCUAAUCGU |
| | | AACUUCAUGCAAUUGAUCCACGACGACAGCCUGACCUUUAAGGAGGACAUCCAAAAAGCACAAGUGUCC |
| | | GGACAGGGAGACUCACUCCAUGAACACAUCGCGAAUCUGGCCGGUUCGCCGGCGAUUAAGAAGGGAAUU |
| | | CUGCAAACUGUGAAGGUGGUCGACGAGCUGGUGAAGGUCAUGGGACGGCACAAACCGGAGAAUAUCGUG |
| | | AUUGAAAUGGCCCGAGAAAACCAGACUACCCAGAAGGGCCAGAAAAACUCCCGCGAAAGGAUGAAGCGG |
| | | AUCGAAGAAGGAAUCAAGGAGCUGGGCAGCCAGAUCCUGAAAGAGCACCCGGUGGAAAACACGCAGCUG |
| | | CAGAACGAGAAGCUCUACCUGUACUAUUUGCAAAAUGGACGGGACAUGUACGUGGACCAAGAGCUGGAC |
| | | AUCAAUCGGUUGUCUGAUUACGACGUGGACCACAUCGUUCCACAGUCCUUUCUGAAGGAUGACUCGAUC |
| | | GAUAACAAGGUGUUGACUCGCAGCGACAAGAACAGAGGGAAGUCAGAUAAUGUGCCAUCGGAGGAGGUC |
| | | GUGAAGAAGAUGAAGAAUUACUGGCGGCAGCUCCUGAAUGCGAAGCUGAUUACCCAGAGAAAGUUUGAC |
| | | AAUCUCACUAAAGCCGAGCGCGGCGGACUCUCAGAGCUGGAUAAGGCUGGAUUCAUCAAACGGCAGCUG |
| | | GUCGAGACUCGGCAGAUUACCAAGCACGUGGCGCAGAUCUUGGACUCCCGCAUGAACACUAAAUACGAC |
| | | GAGAACGAUAAGCUCAUCCGGGAAGUGAAGGUGAUUACCCUGAAAAGCAAACUUGUGUCGGACUUUCGG |
| | | AAGGACUUUCAGUUUUACAAAGUGAGAGAAAUCAACAACUACCAUCACGCGCAUGACGCAUACCUCAAC |
| | | GCUGUGGUCGGUACCGCCCUGAUCAAAAAGUACCCUAAACUUGAAUCGGAGUUUGUGUACGGAGACUAC |
| | | AAGGUCUACGACGUGAGGAAGAUGAUAGCCAAGUCCGAACAGGAAAUCGGGAAAGCAACUGCGAAAUAC |
| | | UUCUUUUACUCAAACAUCAUGAACUUUUUCAAGACUGAAAUUACGCUGGCCAAUGGAGAAAUCAGGAAG |
| | | AGGCCACUGAUCGAAACUAACGGAGAAACGGGCGAAAUCGUGUGGGACAAGGGCAGGGACUUCGCAACU |
| | | GUUCGCAAAGUGCUCUCUAUGCCGCAAGUCAAUAUUGUGAAGAAAACCGAAGUGCAAACCGGCGGAUUU |
| | | UCAAAGGAAUCGAUCCUCCCAAAGAGAAAUAGCGACAAGCUCAUUGCACGCAAGAAAGACUGGGACCCG |
| | | AAGAAGUACGGAGGAUUCGAUUCGCCGACUGUCGCAUACUCCGUCCUCGUGGUGGCCAAGGUGGAGAAG |
| | | GGAAAGAGCAAAAAGCUCAAAUCCGUCAAAGAGCUGCUGGGGAUUACCAUCAUGGAACGAUCCUCGUUC |
| | | GAGAAGAACCCGAUUGAUUUCCUCGAGGCGAAGGGUUACAAGGAGGUGAAGAAGGAUCUGAUCAUCAAA |
| | | CUCCCCAAGUACUCACUGUUCGAACUGGAAAAUGGUCGGAAGCGCAUGCUGGCUUCGGCCGGAGAACUC |
| | | CAAAAAGGAAAUGAGCUGGCCUUGCCUAGCAAGUACGUCAACUUCCUCUAUCUUGCUUCGCACUACGAA |
| | | AAACUCAAAGGGUCACCGGAAGAUAACGAACAGAAGCAGCUUUUCGUGGAGCAGCACAAGCAUUAUCUG |
| | | GAUGAAAUCAUCGAACAAAUCUCCGAGUUUUCAAAGCGCGUGAUCCUCGCCGACGCCAACCUCGACAAA |
| | | GUCCUGUCGGCCUACAAUAAGCAUAGAGAUAAGCCGAUCAGAGAACAGGCCGAGAACAUUAUCCACUUG |
| | | UUCACCCUGACUAACCUGGGAGCCCCAGCCGCCUUCAAGUACUUCGAUACUACUAUCGAUCGCAAAAGAU |
| | | ACACGUCCACCAAGGAAGUUCUGGACGCGACCCUGAUCCACCAAAGCAUCACUGGACUCUACGAAACUAG |
| | | GAUCGAUCUGUCGCAGCUGGGUGGCGAUGGCGGUGGAUCUCCGAAAAAGAAGAGAAAGGUGUAAUGA |
| 1106 | Cas9 nickase | AUGGACAAGAAGUACAGCAUCGGACUGGCAAUCGGAACAAACAGCGUCGGAUGGGCAGUCAUCACAGAC |
| | (D10A) mRNA | GAAUACAAGGUCCCGAGCAAGAAGUUCAAGGUCCUGGGAAACACAGACAGACACAGCAUCAAGAAGAAC |
| | ORF | CUGAUCGGAGCACUGCUGUUCGACAGCGGAGAAACAGCAGAAGCAACAAGACUGAAGAGAACAGCAAGA |
| | | AGAAGAUACACAAGAAGAAAGAACAGAAUCUGCUACCUGCAGGAAAUCUUCAGCAACGAAAUGGCAAAG |
| | | GUCGACGACAGCUUCUUCCACAGACUGGAAGAAAGCUUCCUGGUCGAAGAAGACAAGAAGCACGAAAGA |
| | | CACCCGAUCUUCGGAAACAUCGUCGACGAAGUCGCAUACCACGAAAAGUACCCGACAAUCUACCACCUGA |
| | | GAAAGAAGCUGGUCGACAGCACAGACAAGGCAGACCUGAGACUGAUCUACCUGGCACUGGCACACAUGA |
| | | UCAAGUUCAGAGGACACUUCCUGAUCGAAGGAGACCUGAACCCGGACAACAGCGACGUCGACAAGCUGU |
| | | UCAUCCAGCUGGUCCAGACAUACAACCAGCUGUUCGAAGAAAACCCGAUCAACGCAAGCGGAGUCGACGC |
| | | AAAGGCAAUCCUGAGCGCAAGACUGAGCAAGAGCAGAAGACUGGAAAACCUGAUCGCACAGCUGCCGGG |
| | | AGAAAAGAAGAACGGACUGUUCGGAAACCUGAUCGCACUGAGCCUGGGACUGACACCGAACUUCAAGAG |
| | | CAACUUCGACCUGGCAGAAGACGCAAAGCUGCAGCUGAGCAAGGACACAUACGACGACGACCUGGACAA |
| | | CCUGCUGGCACAGAUCGGAGACCAGUACGCAGACCUGUUCCUGGCAGCAAAGAACCUGAGCGACGCAAUC |
| | | CUGCUGAGCGACAUCCUGAGAGUCAACACAGAAAUCACAAAGGCACCGCUGAGCGCAAGCAUGAUCAAG |
| | | AGAUACGACGAACACCACCAGGACCUGACACUGCUGAAGGCACUGGUCAGACAGCAGCUGCCGGAAAAG |
| | | UACAAGGAAAUCUUCUUCGACCAGAGCAAGAACGGAUACGCAGGAUACAUCGACGGAGGAGCAAGCCAG |
| | | GAAGAAUUCUACAAGUUCAUCAAGCCGAUCCUGGAAAAGAUGGACGGAACAGAAGAACUGCUGGUCAAG |
| | | CUGAACAGAGAAGACCUGCUGAGAAAGCAGAGAACAUUCGACAACGGAAGCAUCCCGCACCAGAUCCAC |
| | | CUGGGAGAACUGCACGCAAUCCUGAGAAGACAGGAAGACUUCUACCCGUUCCUGAAGGACAACAGAGAA |
| | | AAGAUCGAAAAGAUCCUGACAUUCAGAAUCCCGUACUACGUCGGACCGCUGGCAAGAGGAAACAGCAGA |
| | | UUCGCAUGGAUGACAAGAAAGAGCGAAGAAACAAUCACACCGUGGAACUUCGAAGAAGUCGUCGACAAG |
| | | GGAGCAAGCGCACAGAGCUUCAUCGAAAGAAUGACAAACUUCGACAAGAACCUGCCGAACGAAAAGGUC |
| | | CUGCCGAAGCACAGCCUGCUGUACGAAUACUUCACAGUCUACAACGAACUGACAAAGGUCAAGUACGUC |
| | | ACAGAAGGAAUGAGAAAGCCGGCAUUCCUGAGCGGAGAACAGAAGAAGGCAAUCGUCGACCUGCUGUUC |
| | | AAGACAAACAGAAAGGUCACAGUCAAGCAGCUGAAGGAAGACUACUUCAAGAAGAUCGAAUGCUUCGAC |
| | | AGCGUCGAAAUCAGCGGAGUCGAAGACAGAUUCAACGCAAGCCUGGGAACAUACCACGACCUGCUGAAG |
| | | AUCAUCAAGGACAAGGACUUCCUGGACAACGAAGAAAACGAAGACAUCCUGGAAGACAUCGUCCUGACA |
| | | CUGACACUGUUCGAAGACAGAGAAAUGAUCGAAGAAAGACUGAAGACAUACGCACACCUGUUCGACGAC |
| | | AAGGUCAUGAAGCAGCUGAAGAGAAGAAGAUACACAGGAUGGGGAAGACUGAGCAGAAAGCUGAUCAAC |
| | | GGAAUCAGAGACAAGCAGAGCGGAAAGACAAUCCUGGACUUCCUGAAGAGCGACGGAUUCGCAAACAGA |
| | | AACUUCAUGCAGCUGAUCCACGACGACAGCCUGACAUUCAAGGAAGACAUCCAGAAGGCACAGGUCAGC |
| | | GGACAGGGAGACAGCCUGCACGAACACAUCGCAAACCUGGCAGGAAGCCCGGCAAUCAAGAAGGGAAUC |
| | | CUGCAGACAGUCAAGGUCGUCGACGAACUGGUCAAGGUCAUGGGAAGACACAAGCCGGAAAACAUCGUC |
| | | AUCGAAAUGGCAAGAGAAAACCAGACAACACAGAAGGGACAGAAGAACAGCAGAGAAAGAAUGAAGAGA |
| | | AUCGAAGAAGGAAUCAAGGAACUGGGAAGCCAGAUCCUGAAGGAACACCCGGUCGAAAACACACAGCUG |
| | | CAGAACGAAAAGCUGUACCUGUACUACCUGCAGAACGGAAGAGACAUGUACGUCGACCAGGAACUGGAC |
| | | AUCAACAGACUGAGCGACUACGACGUCGACCACAUCGUCCCGCAGAGCUUCCUGAAGGACGACAGCAUCG |
| | | ACAACAAGGUCCUGACAAGAAGCGACAAGAACAGAGGAAAGAGCGACAACGUCCCGAGCGAAGAAGUCG |
| | | UCAAGAAGAUGAAGAACUACUGGAGACAGCUGCUGAACGCAAAGCUGAUCACACAGAGAAAGUUCGACA |
| | | ACCUGACAAAGGCAGAGAGAGGAGGACUGAGCGAACUGGACAAGGCAGGAUUCAUCAAGAGACAGCUGG |
| | | UCGAAACAAGACAGAUCACAAAGCACGUCGCACAGAUCCUGGACAGCAGAAUGAACACAAAGUACGACG |
| | | AAAACGACAAGCUGAUCAGAGAAGUCAAGGUCAUCACACUGAAGAGCAAGCUGGUCAGCGACUUCAGAA |
| | | AGGACUUCCAGUUCUACAAGGUCAGAGAAAUCAACAACUACCACCACGCACACGACGCAUACCUGAACGC |
| | | AGUCGUCGGAACAGCACUGAUCAAGAAGUACCCGAAGCUGGAAAGCGAAUUCGUCUACGGAGACUACAA |
| | | GGUCUACGACGUCAGAAAGAUGAUCGCAAAGAGCGAACAGGAAAUCGGAAAGGCAACAGCAAAGUACUU |
| | | CUUCUACAGCAACAUCAUGAACUUCUUCAAGACAGAAAUCACACUGGCAAACGGAGAAAUCAGAAAGAG |
| | | ACCGCUGAUCGAAACAAACGGAGAAACAGGAGAAAUCGUCUGGGACAAGGGAAGAGACUUCGCAACAGU |
| | | CAGAAAGGUCCUGAGCAUGCCGCAGGUCAACAUCGUCAAGAAGACAGAAGUCCAGACAGGAGGAUUCAG |
| | | CAAGGAAAGCAUCCUGCCGAAGAGAAACAGCGACAAGCUGAUCGCAAGAAAGAAGGACUGGGACCCGAA |
| | | GAAGUACGGAGGAUUCGACAGCCCGACAGUCGCAUACAGCGUCCUGGUCGUCGCAAAGGUCGAAAAGGG |
| | | AAAGAGCAAGAAGCUGAAGAGCGUCAAGGAACUGCUGGGAAUCACAAUCAUGGAAAGAAGCAGCUUCGA |
| | | AAAGAACCCGAUCGACUUCCUGGAAGCAAAGGGAUACAAGGAAGUCAAGAAGGACCUGAUCAUCAAGCU |
| | | GCCGAAGUACAGCCUGUUCGAACUGGAAAACGGAAGAAAGAGAAUGCUGGCAAGCGCAGGAGAACUGCA |
| | | GAAGGGAAACGAACUGGCACUGCCGAGCAAGUACGUCAACUUCCUGUACCUGGCAAGCCACUACGAAAA |
| | | GCUGAAGGGAAGCCCGGAAGACAACGAACAGAAGCAGCUGUUCGUCGAACAGCACAAGCACUACCUGGA |
| | | CGAAAUCAUCGAACAGAUCAGCGAAUUCAGCAAGAGAGUCAUCCUGGCAGACGCAAACCUGGACAAGGU |
| | | CCUGAGCGCAUACAACAAGCACAGAGACAAGCCGAUCAGAGAACAGGCAGAAAACAUCAUCCACCUGUU |
| | | CACACUGACAAACCUGGGAGCACCGGCAGCAUUCAAGUACUUCGACACAACAAUCGACAGAAAGAGAUA |
| | | CACAAGCACAAAGGAAGUCCUGGACGCAACACUGAUCCACCAGAGCAUCACAGGACUGUACGAAACAAG |
| | | AAUCGACCUGAGCCAGCUGGGAGGAGACGGAGGAGGAAGCCCGAAGAAGAAGAGAAAGGUCUAG |
| 1107 | dCas9 (D10A | AUGGACAAGAAGUACAGCAUCGGACUGGCAAUCGGAACAAACAGCGUCGGAUGGGCAGUCAUCACAGAC |
| | H840A) mRNA | GAAUACAAGGUCCCGAGCAAGAAGUUCAAGGUCCUGGGAAACACAGACAGACACAGCAUCAAGAAGAAC |
| | ORF | CUGAUCGGAGCACUGCUGUUCGACAGCGGAGAAACAGCAGAAGCAACAAGACUGAAGAGAACAGCAAGA |
| | | AGAAGAUACACAAGAAGAAAGAACAGAAUCUGCUACCUGCAGGAAAUCUUCAGCAACGAAAUGGCAAAG |
| | | GUCGACGACAGCUUCUUCCACAGACUGGAAGAAAGCUUCCUGGUCGAAGAAGACAAGAAGCACGAAAGA |
| | | CACCCGAUCUUCGGAAACAUCGUCGACGAAGUCGCAUACCACGAAAAGUACCCGACAAUCUACCACCUGA |
| | | GAAAGAAGCUGGUCGACAGCACAGACAAGGCAGACCUGAGACUGAUCUACCUGGCACUGGCACACAUGA |
| | | UCAAGUUCAGAGGACACUUCCUGAUCGAAGGAGACCUGAACCCGGACAACAGCGACGUCGACAAGCUGU |
| | | UCAUCCAGCUGGUCCAGACAUACAACCAGCUGUUCGAAGAAAACCCGAUCAACGCAAGCGGAGUCGACGC |
| | | AAAGGCAAUCCUGAGCGCAAGACUGAGCAAGAGCAGAAGACUGGAAAACCUGAUCGCACAGCUGCCGGG |
| | | AGAAAAGAAGAACGGACUGUUCGGAAACCUGAUCGCACUGAGCCUGGGACUGACACCGAACUUCAAGAG |
| | | CAACUUCGACCUGGCAGAAGACGCAAAGCUGCAGCUGAGCAAGGACACAUACGACGACGACCUGGACAA |
| | | CCUGCUGGCACAGAUCGGAGACCAGUACGCAGACCUGUUCCUGGCAGCAAAGAACCUGAGCGACGCAAUC |
| | | CUGCUGAGCGACAUCCUGAGAGUCAACACAGAAAUCACAAAGGCACCGCUGAGCGCAAGCAUGAUCAAG |
| | | AGAUACGACGAACACCACCAGGACCUGACACUGCUGAAGGCACUGGUCAGACAGCAGCUGCCGGAAAAG |
| | | UACAAGGAAAUCUUCUUCGACCAGAGCAAGAACGGAUACGCAGGAUACAUCGACGGAGGAGCAAGCCAG |
| | | GAAGAAUUCUACAAGUUCAUCAAGCCGAUCCUGGAAAAGAUGGACGGAACAGAAGAACUGCUGGUCAAG |
| | | CUGAACAGAGAAGACCUGCUGAGAAAGCAGAGAACAUUCGACAACGGAAGCAUCCCGCACCAGAUCCAC |
| | | CUGGGAGAACUGCACGCAAUCCUGAGAAGACAGGAAGACUUCUACCCGUUCCUGAAGGACAACAGAGAA |
| | | AAGAUCGAAAAGAUCCUGACAUUCAGAAUCCCGUACUACGUCGGACCGCUGGCAAGAGGAAACAGCAGA |
| | | UUCGCAUGGAUGACAAGAAAGAGCGAAGAAACAAUCACACCGUGGAACUUCGAAGAAGUCGUCGACAAG |
| | | GGAGCAAGCGCACAGAGCUUCAUCGAAAGAAUGACAAACUUCGACAAGAACCUGCCGAACGAAAAGGUC |
| | | CUGCCGAAGCACAGCCUGCUGUACGAAUACUUCACAGUCUACAACGAACUGACAAAGGUCAAGUACGUC |
| | | ACAGAAGGAAUGAGAAAGCCGGCAUUCCUGAGCGGAGAACAGAAGAAGGCAAUCGUCGACCUGCUGUUC |
| | | AAGACAAACAGAAAGGUCACAGUCAAGCAGCUGAAGGAAGACUACUUCAAGAAGAUCGAAUGCUUCGAC |
| | | AGCGUCGAAAUCAGCGGAGUCGAAGACAGAUUCAACGCAAGCCUGGGAACAUACCACGACCUGCUGAAG |
| | | AUCAUCAAGGACAAGGACUUCCUGGACAACGAAGAAAACGAAGACAUCCUGGAAGACAUCGUCCUGACA |
| | | CUGACACUGUUCGAAGACAGAGAAAUGAUCGAAGAAAGACUGAAGACAUACGCACACCUGUUCGACGAC |
| | | AAGGUCAUGAAGCAGCUGAAGAGAAGAAGAUACACAGGAUGGGGAAGACUGAGCAGAAAGCUGAUCAAC |
| | | GGAAUCAGAGACAAGCAGAGCGGAAAGACAAUCCUGGACUUCCUGAAGAGCGACGGAUUCGCAAACAGA |
| | | AACUUCAUGCAGCUGAUCCACGACGACAGCCUGACAUUCAAGGAAGACAUCCAGAAGGCACAGGUCAGC |
| | | GGACAGGGAGACAGCCUGCACGAACACAUCGCAAACCUGGCAGGAAGCCCGGCAAUCAAGAAGGGAAUC |
| | | CUGCAGACAGUCAAGGUCGUCGACGAACUGGUCAAGGUCAUGGGAAGACACAAGCCGGAAAACAUCGUC |
| | | AUCGAAAUGGCAAGAGAAAACCAGACAACACAGAAGGGACAGAAGAACAGCAGAGAAAGAAUGAAGAGA |
| | | AUCGAAGAAGGAAUCAAGGAACUGGGAAGCCAGAUCCUGAAGGAACACCCGGUCGAAAACACACAGCUG |
| | | CAGAACGAAAAGCUGUACCUGUACUACCUGCAGAACGGAAGAGACAUGUACGUCGACCAGGAACUGGAC |
| | | AUCAACAGACUGAGCGACUACGACGUCGACGCAAUCGUCCCGCAGAGCUUCCUGAAGGACGACAGCAUCG |
| | | ACAACAAGGUCCUGACAAGAAGCGACAAGAACAGAGGAAAGAGCGACAACGUCCCGAGCGAAGAAGUCG |
| | | UCAAGAAGAUGAAGAACUACUGGAGACAGCUGCUGAACGCAAAGCUGAUCACACAGAGAAAGUUCGACA |
| | | ACCUGACAAAGGCAGAGAGAGGAGGACUGAGCGAACUGGACAAGGCAGGAUUCAUCAAGAGACAGCUGG |
| | | UCGAAACAAGACAGAUCACAAAGCACGUCGCACAGAUCCUGGACAGCAGAAUGAACACAAAGUACGACG |
| | | AAAACGACAAGCUGAUCAGAGAAGUCAAGGUCAUCACACUGAAGAGCAAGCUGGUCAGCGACUUCAGAA |
| | | AGGACUUCCAGUUCUACAAGGUCAGAGAAAUCAACAACUACCACCACGCACACGACGCAUACCUGAACGC |
| | | AGUCGUCGGAACAGCACUGAUCAAGAAGUACCCGAAGCUGGAAAGCGAAUUCGUCUACGGAGACUACAA |
| | | GGUCUACGACGUCAGAAAGAUGAUCGCAAAGAGCGAACAGGAAAUCGGAAAGGCAACAGCAAAGUACUU |
| | | CUUCUACAGCAACAUCAUGAACUUCUUCAAGACAGAAAUCACACUGGCAAACGGAGAAAUCAGAAAGAG |
| | | ACCGCUGAUCGAAACAAACGGAGAAACAGGAGAAAUCGUCUGGGACAAGGGAAGAGACUUCGCAACAGU |
| | | CAGAAAGGUCCUGAGCAUGCCGCAGGUCAACAUCGUCAAGAAGACAGAAGUCCAGACAGGAGGAUUCAG |
| | | CAAGGAAAGCAUCCUGCCGAAGAGAAACAGCGACAAGCUGAUCGCAAGAAAGAAGGACUGGGACCCGAA |
| | | GAAGUACGGAGGAUUCGACAGCCCGACAGUCGCAUACAGCGUCCUGGUCGUCGCAAAGGUCGAAAAGGG |
| | | AAAGAGCAAGAAGCUGAAGAGCGUCAAGGAACUGCUGGGAAUCACAAUCAUGGAAAGAAGCAGCUUCGA |
| | | AAAGAACCCGAUCGACUUCCUGGAAGCAAAGGGAUACAAGGAAGUCAAGAAGGACCUGAUCAUCAAGCU |
| | | GCCGAAGUACAGCCUGUUCGAACUGGAAAACGGAAGAAAGAGAAUGCUGGCAAGCGCAGGAGAACUGCA |
| | | GAAGGGAAACGAACUGGCACUGCCGAGCAAGUACGUCAACUUCCUGUACCUGGCAAGCCACUACGAAAA |
| | | GCUGAAGGGAAGCCCGGAAGACAACGAACAGAAGCAGCUGUUCGUCGAACAGCACAAGCACUACCUGGA |
| | | CGAAAUCAUCGAACAGAUCAGCGAAUUCAGCAAGAGAGUCAUCCUGGCAGACGCAAACCUGGACAAGGU |
| | | CCUGAGCGCAUACAACAAGCACAGAGACAAGCCGAUCAGAGAACAGGCAGAAAACAUCAUCCACCUGUU |
| | | CACACUGACAAACCUGGGAGCACCGGCAGCAUUCAAGUACUUCGACACAACAAUCGACAGAAAGAGAUA |
| | | CACAAGCACAAAGGAAGUCCUGGACGCAACACUGAUCCACCAGAGCAUCACAGGACUGUACGAAACAAG |
| | | AAUCGACCUGAGCCAGCUGGGAGGAGACGGAGGAGGAAGCCCGAAGAAGAAGAGAAAGGUCUAG |
| 1108 | Cas9 coding | GACAAGAAGUACAGCAUCGGACUGGACAUCGGAACAAACAGCGUCGGAUGGGCAGUCAUCACAGACGAA |
| | sequence, | UACAAGGUCCCGAGCAAGAAGUUCAAGGUCCUGGGAAACACAGACAGACACAGCAUCAAGAAGAACCUG |
| | without | AUCGGAGCACUGCUGUUCGACAGCGGAGAAACAGCAGAAGCAACAAGACUGAAGAGAACAGCAAGAAGA |
| | start or stop | AGAUACACAAGAAGAAAGAACAGAAUCUGCUACCUGCAGGAAAUCUUCAGCAACGAAAUGGCAAAGGUC |
| | codons | GACGACAGCUUCUUCCACAGACUGGAAGAAAGCUUCCUGGUCGAAGAAGACAAGAAGCACGAAAGACAC |
| | | CCGAUCUUCGGAAACAUCGUCGACGAAGUCGCAUACCACGAAAAGUACCCGACAAUCUACCACCUGAGAA |
| | | AGAAGCUGGUCGACAGCACAGACAAGGCAGACCUGAGACUGAUCUACCUGGCACUGGCACACAUGAUCA |
| | | AGUUCAGAGGACACUUCCUGAUCGAAGGAGACCUGAACCCGGACAACAGCGACGUCGACAAGCUGUUCA |
| | | UCCAGCUGGUCCAGACAUACAACCAGCUGUUCGAAGAAAACCCGAUCAACGCAAGCGGAGUCGACGCAA |
| | | AGGCAAUCCUGAGCGCAAGACUGAGCAAGAGCAGAAGACUGGAAAACCUGAUCGCACAGCUGCCGGGAG |
| | | AAAAGAAGAACGGACUGUUCGGAAACCUGAUCGCACUGAGCCUGGGACUGACACCGAACUUCAAGAGCA |
| | | ACUUCGACCUGGCAGAAGACGCAAAGCUGCAGCUGAGCAAGGACACAUACGACGACGACCUGGACAACC |
| | | UGCUGGCACAGAUCGGAGACCAGUACGCAGACCUGUUCCUGGCAGCAAAGAACCUGAGCGACGCAAUCC |
| | | UGCUGAGCGACAUCCUGAGAGUCAACACAGAAAUCACAAAGGCACCGCUGAGCGCAAGCAUGAUCAAGA |
| | | GAUACGACGAACACCACCAGGACCUGACACUGCUGAAGGCACUGGUCAGACAGCAGCUGCCGGAAAAGU |
| | | ACAAGGAAAUCUUCUUCGACCAGAGCAAGAACGGAUACGCAGGAUACAUCGACGGAGGAGCAAGCCAGG |
| | | AAGAAUUCUACAAGUUCAUCAAGCCGAUCCUGGAAAAGAUGGACGGAACAGAAGAACUGCUGGUCAAGC |
| | | UGAACAGAGAAGACCUGCUGAGAAAGCAGAGAACAUUCGACAACGGAAGCAUCCCGCACCAGAUCCACC |
| | | UGGGAGAACUGCACGCAAUCCUGAGAAGACAGGAAGACUUCUACCCGUUCCUGAAGGACAACAGAGAAA |
| | | AGAUCGAAAAGAUCCUGACAUUCAGAAUCCCGUACUACGUCGGACCGCUGGCAAGAGGAAACAGCAGAU |
| | | UCGCAUGGAUGACAAGAAAGAGCGAAGAAACAAUCACACCGUGGAACUUCGAAGAAGUCGUCGACAAGG |
| | | GAGCAAGCGCACAGAGCUUCAUCGAAAGAAUGACAAACUUCGACAAGAACCUGCCGAACGAAAAGGUCC |
| | | UGCCGAAGCACAGCCUGCUGUACGAAUACUUCACAGUCUACAACGAACUGACAAAGGUCAAGUACGUCA |
| | | CAGAAGGAAUGAGAAAGCCGGCAUUCCUGAGCGGAGAACAGAAGAAGGCAAUCGUCGACCUGCUGUUCA |
| | | AGACAAACAGAAAGGUCACAGUCAAGCAGCUGAAGGAAGACUACUUCAAGAAGAUCGAAUGCUUCGACA |
| | | GCGUCGAAAUCAGCGGAGUCGAAGACAGAUUCAACGCAAGCCUGGGAACAUACCACGACCUGCUGAAGA |
| | | UCAUCAAGGACAAGGACUUCCUGGACAACGAAGAAAACGAAGACAUCCUGGAAGACAUCGUCCUGACAC |
| | | UGACACUGUUCGAAGACAGAGAAAUGAUCGAAGAAAGACUGAAGACAUACGCACACCUGUUCGACGACA |
| | | AGGUCAUGAAGCAGCUGAAGAGAAGAAGAUACACAGGAUGGGGAAGACUGAGCAGAAAGCUGAUCAACG |
| | | GAAUCAGAGACAAGCAGAGCGGAAAGACAAUCCUGGACUUCCUGAAGAGCGACGGAUUCGCAAACAGAA |
| | | ACUUCAUGCAGCUGAUCCACGACGACAGCCUGACAUUCAAGGAAGACAUCCAGAAGGCACAGGUCAGCG |
| | | GACAGGGAGACAGCCUGCACGAACACAUCGCAAACCUGGCAGGAAGCCCGGCAAUCAAGAAGGGAAUCC |
| | | UGCAGACAGUCAAGGUCGUCGACGAACUGGUCAAGGUCAUGGGAAGACACAAGCCGGAAAACAUCGUCA |
| | | UCGAAAUGGCAAGAGAAAACCAGACAACACAGAAGGGACAGAAGAACAGCAGAGAAAGAAUGAAGAGAA |
| | | UCGAAGAAGGAAUCAAGGAACUGGGAAGCCAGAUCCUGAAGGAACACCCGGUCGAAAACACACAGCUGC |
| | | AGAACGAAAAGCUGUACCUGUACUACCUGCAGAACGGAAGAGACAUGUACGUCGACCAGGAACUGGACA |
| | | UCAACAGACUGAGCGACUACGACGUCGACCACAUCGUCCCGCAGAGCUUCCUGAAGGACGACAGCAUCGA |
| | | CAACAAGGUCCUGACAAGAAGCGACAAGAACAGAGGAAAGAGCGACAACGUCCCGAGCGAAGAAGUCGU |
| | | CAAGAAGAUGAAGAACUACUGGAGACAGCUGCUGAACGCAAAGCUGAUCACACAGAGAAAGUUCGACAA |
| | | CCUGACAAAGGCAGAGAGAGGAGGACUGAGCGAACUGGACAAGGCAGGAUUCAUCAAGAGACAGCUGGU |
| | | CGAAACAAGACAGAUCACAAAGCACGUCGCACAGAUCCUGGACAGCAGAAUGAACACAAAGUACGACGA |
| | | AAACGACAAGCUGAUCAGAGAAGUCAAGGUCAUCACACUGAAGAGCAAGCUGGUCAGCGACUUCAGAAA |
| | | GGACUUCCAGUUCUACAAGGUCAGAGAAAUCAACAACUACCACCACGCACACGACGCAUACCUGAACGCA |
| | | GUCGUCGGAACAGCACUGAUCAAGAAGUACCCGAAGCUGGAAAGCGAAUUCGUCUACGGAGACUACAAG |
| | | GUCUACGACGUCAGAAAGAUGAUCGCAAAGAGCGAACAGGAAAUCGGAAAGGCAACAGCAAAGUACUUC |
| | | UUCUACAGCAACAUCAUGAACUUCUUCAAGACAGAAAUCACACUGGCAAACGGAGAAAUCAGAAAGAGA |
| | | CCGCUGAUCGAAACAAACGGAGAAACAGGAGAAAUCGUCUGGGACAAGGGAAGAGACUUCGCAACAGUC |
| | | AGAAAGGUCCUGAGCAUGCCGCAGGUCAACAUCGUCAAGAAGACAGAAGUCCAGACAGGAGGAUUCAGC |
| | | AAGGAAAGCAUCCUGCCGAAGAGAAACAGCGACAAGCUGAUCGCAAGAAAGAAGGACUGGGACCCGAAG |
| | | AAGUACGGAGGAUUCGACAGCCCGACAGUCGCAUACAGCGUCCUGGUCGUCGCAAAGGUCGAAAAGGGA |
| | | AAGAGCAAGAAGCUGAAGAGCGUCAAGGAACUGCUGGGAAUCACAAUCAUGGAAAGAAGCAGCUUCGAA |
| | | AAGAACCCGAUCGACUUCCUGGAAGCAAAGGGAUACAAGGAAGUCAAGAAGGACCUGAUCAUCAAGCUG |
| | | CCGAAGUACAGCCUGUUCGAACUGGAAAACGGAAGAAAGAGAAUGCUGGCAAGCGCAGGAGAACUGCAG |
| | | AAGGGAAACGAACUGGCACUGCCGAGCAAGUACGUCAACUUCCUGUACCUGGCAAGCCACUACGAAAAG |
| | | CUGAAGGGAAGCCCGGAAGACAACGAACAGAAGCAGCUGUUCGUCGAACAGCACAAGCACUACCUGGAC |
| | | GAAAUCAUCGAACAGAUCAGCGAAUUCAGCAAGAGAGUCAUCCUGGCAGACGCAAACCUGGACAAGGUC |
| | | CUGAGCGCAUACAACAAGCACAGAGACAAGCCGAUCAGAGAACAGGCAGAAAACAUCAUCCACCUGUUC |
| | | ACACUGACAAACCUGGGAGCACCGGCAGCAUUCAAGUACUUCGACACAACAAUCGACAGAAAGAGAUAC |
| | | ACAAGCACAAAGGAAGUCCUGGACGCAACACUGAUCCACCAGAGCAUCACAGGACUGUACGAAACAAGA |
| | | AUCGACCUGAGCCAGCUGGGAGGAGACGGAGGAGGAAGCCCGAAGAAGAAGAGAAAGGUC |
| 1109 | Cas9 nickase | GACAAGAAGUACAGCAUCGGACUGGCAAUCGGAACAAACAGCGUCGGAUGGGCAGUCAUCACAGACGAA |
| | coding sequence, | UACAAGGUCCCGAGCAAGAAGUUCAAGGUCCUGGGAAACACAGACAGACACAGCAUCAAGAAGAACCUG |
| | without stop or | AUCGGAGCACUGCUGUUCGACAGCGGAGAAACAGCAGAAGCAACAAGACUGAAGAGAACAGCAAGAAGA |
| | start codons | AGAUACACAAGAAGAAAGAACAGAAUCUGCUACCUGCAGGAAAUCUUCAGCAACGAAAUGGCAAAGGUC |
| | | GACGACAGCUUCUUCCACAGACUGGAAGAAAGCUUCCUGGUCGAAGAAGACAAGAAGCACGAAAGACAC |
| | | CCGAUCUUCGGAAACAUCGUCGACGAAGUCGCAUACCACGAAAAGUACCCGACAAUCUACCACCUGAGAA |
| | | AGAAGCUGGUCGACAGCACAGACAAGGCAGACCUGAGACUGAUCUACCUGGCACUGGCACACAUGAUCA |
| | | AGUUCAGAGGACACUUCCUGAUCGAAGGAGACCUGAACCCGGACAACAGCGACGUCGACAAGCUGUUCA |
| | | UCCAGCUGGUCCAGACAUACAACCAGCUGUUCGAAGAAAACCCGAUCAACGCAAGCGGAGUCGACGCAA |
| | | AGGCAAUCCUGAGCGCAAGACUGAGCAAGAGCAGAAGACUGGAAAACCUGAUCGCACAGCUGCCGGGAG |
| | | AAAAGAAGAACGGACUGUUCGGAAACCUGAUCGCACUGAGCCUGGGACUGACACCGAACUUCAAGAGCA |
| | | ACUUCGACCUGGCAGAAGACGCAAAGCUGCAGCUGAGCAAGGACACAUACGACGACGACCUGGACAACC |
| | | UGCUGGCACAGAUCGGAGACCAGUACGCAGACCUGUUCCUGGCAGCAAAGAACCUGAGCGACGCAAUCC |
| | | UGCUGAGCGACAUCCUGAGAGUCAACACAGAAAUCACAAAGGCACCGCUGAGCGCAAGCAUGAUCAAGA |
| | | GAUACGACGAACACCACCAGGACCUGACACUGCUGAAGGCACUGGUCAGACAGCAGCUGCCGGAAAAGU |
| | | ACAAGGAAAUCUUCUUCGACCAGAGCAAGAACGGAUACGCAGGAUACAUCGACGGAGGAGCAAGCCAGG |
| | | AAGAAUUCUACAAGUUCAUCAAGCCGAUCCUGGAAAAGAUGGACGGAACAGAAGAACUGCUGGUCAAGC |
| | | UGAACAGAGAAGACCUGCUGAGAAAGCAGAGAACAUUCGACAACGGAAGCAUCCCGCACCAGAUCCACC |
| | | UGGGAGAACUGCACGCAAUCCUGAGAAGACAGGAAGACUUCUACCCGUUCCUGAAGGACAACAGAGAAA |
| | | AGAUCGAAAAGAUCCUGACAUUCAGAAUCCCGUACUACGUCGGACCGCUGGCAAGAGGAAACAGCAGAU |
| | | UCGCAUGGAUGACAAGAAAGAGCGAAGAAACAAUCACACCGUGGAACUUCGAAGAAGUCGUCGACAAGG |
| | | GAGCAAGCGCACAGAGCUUCAUCGAAAGAAUGACAAACUUCGACAAGAACCUGCCGAACGAAAAGGUCC |
| | | UGCCGAAGCACAGCCUGCUGUACGAAUACUUCACAGUCUACAACGAACUGACAAAGGUCAAGUACGUCA |
| | | CAGAAGGAAUGAGAAAGCCGGCAUUCCUGAGCGGAGAACAGAAGAAGGCAAUCGUCGACCUGCUGUUCA |
| | | AGACAAACAGAAAGGUCACAGUCAAGCAGCUGAAGGAAGACUACUUCAAGAAGAUCGAAUGCUUCGACA |
| | | GCGUCGAAAUCAGCGGAGUCGAAGACAGAUUCAACGCAAGCCUGGGAACAUACCACGACCUGCUGAAGA |
| | | UCAUCAAGGACAAGGACUUCCUGGACAACGAAGAAAACGAAGACAUCCUGGAAGACAUCGUCCUGACAC |
| | | UGACACUGUUCGAAGACAGAGAAAUGAUCGAAGAAAGACUGAAGACAUACGCACACCUGUUCGACGACA |
| | | AGGUCAUGAAGCAGCUGAAGAGAAGAAGAUACACAGGAUGGGGAAGACUGAGCAGAAAGCUGAUCAACG |
| | | GAAUCAGAGACAAGCAGAGCGGAAAGACAAUCCUGGACUUCCUGAAGAGCGACGGAUUCGCAAACAGAA |
| | | ACUUCAUGCAGCUGAUCCACGACGACAGCCUGACAUUCAAGGAAGACAUCCAGAAGGCACAGGUCAGCG |
| | | GACAGGGAGACAGCCUGCACGAACACAUCGCAAACCUGGCAGGAAGCCCGGCAAUCAAGAAGGGAAUCC |
| | | UGCAGACAGUCAAGGUCGUCGACGAACUGGUCAAGGUCAUGGGAAGACACAAGCCGGAAAACAUCGUCA |
| | | UCGAAAUGGCAAGAGAAAACCAGACAACACAGAAGGGACAGAAGAACAGCAGAGAAAGAAUGAAGAGAA |
| | | UCGAAGAAGGAAUCAAGGAACUGGGAAGCCAGAUCCUGAAGGAACACCCGGUCGAAAACACACAGCUGC |
| | | AGAACGAAAAGCUGUACCUGUACUACCUGCAGAACGGAAGAGACAUGUACGUCGACCAGGAACUGGACA |
| | | UCAACAGACUGAGCGACUACGACGUCGACCACAUCGUCCCGCAGAGCUUCCUGAAGGACGACAGCAUCGA |
| | | CAACAAGGUCCUGACAAGAAGCGACAAGAACAGAGGAAAGAGCGACAACGUCCCGAGCGAAGAAGUCGU |
| | | CAAGAAGAUGAAGAACUACUGGAGACAGCUGCUGAACGCAAAGCUGAUCACACAGAGAAAGUUCGACAA |
| | | CCUGACAAAGGCAGAGAGAGGAGGACUGAGCGAACUGGACAAGGCAGGAUUCAUCAAGAGACAGCUGGU |
| | | CGAAACAAGACAGAUCACAAAGCACGUCGCACAGAUCCUGGACAGCAGAAUGAACACAAAGUACGACGA |
| | | AAACGACAAGCUGAUCAGAGAAGUCAAGGUCAUCACACUGAAGAGCAAGCUGGUCAGCGACUUCAGAAA |
| | | GGACUUCCAGUUCUACAAGGUCAGAGAAAUCAACAACUACCACCACGCACACGACGCAUACCUGAACGCA |
| | | GUCGUCGGAACAGCACUGAUCAAGAAGUACCCGAAGCUGGAAAGCGAAUUCGUCUACGGAGACUACAAG |
| | | GUCUACGACGUCAGAAAGAUGAUCGCAAAGAGCGAACAGGAAAUCGGAAAGGCAACAGCAAAGUACUUC |
| | | UUCUACAGCAACAUCAUGAACUUCUUCAAGACAGAAAUCACACUGGCAAACGGAGAAAUCAGAAAGAGA |
| | | CCGCUGAUCGAAACAAACGGAGAAACAGGAGAAAUCGUCUGGGACAAGGGAAGAGACUUCGCAACAGUC |
| | | AGAAAGGUCCUGAGCAUGCCGCAGGUCAACAUCGUCAAGAAGACAGAAGUCCAGACAGGAGGAUUCAGC |
| | | AAGGAAAGCAUCCUGCCGAAGAGAAACAGCGACAAGCUGAUCGCAAGAAAGAAGGACUGGGACCCGAAG |
| | | AAGUACGGAGGAUUCGACAGCCCGACAGUCGCAUACAGCGUCCUGGUCGUCGCAAAGGUCGAAAAGGGA |
| | | AAGAGCAAGAAGCUGAAGAGCGUCAAGGAACUGCUGGGAAUCACAAUCAUGGAAAGAAGCAGCUUCGAA |
| | | AAGAACCCGAUCGACUUCCUGGAAGCAAAGGGAUACAAGGAAGUCAAGAAGGACCUGAUCAUCAAGCUG |
| | | CCGAAGUACAGCCUGUUCGAACUGGAAAACGGAAGAAAGAGAAUGCUGGCAAGCGCAGGAGAACUGCAG |
| | | AAGGGAAACGAACUGGCACUGCCGAGCAAGUACGUCAACUUCCUGUACCUGGCAAGCCACUACGAAAAG |
| | | CUGAAGGGAAGCCCGGAAGACAACGAACAGAAGCAGCUGUUCGUCGAACAGCACAAGCACUACCUGGAC |
| | | GAAAUCAUCGAACAGAUCAGCGAAUUCAGCAAGAGAGUCAUCCUGGCAGACGCAAACCUGGACAAGGUC |
| | | CUGAGCGCAUACAACAAGCACAGAGACAAGCCGAUCAGAGAACAGGCAGAAAACAUCAUCCACCUGUUC |
| | | ACACUGACAAACCUGGGAGCACCGGCAGCAUUCAAGUACUUCGACACAACAAUCGACAGAAAGAGAUAC |
| | | ACAAGCACAAAGGAAGUCCUGGACGCAACACUGAUCCACCAGAGCAUCACAGGACUGUACGAAACAAGA |
| | | AUCGACCUGAGCCAGCUGGGAGGAGACGGAGGAGGAAGCCCGAAGAAGAAGAGAAAGGUC |
| 1110 | dCas9 coding | GACAAGAAGUACAGCAUCGGACUGGCAAUCGGAACAAACAGCGUCGGAUGGGCAGUCAUCACAGACGAA |
| | sequence, | UACAAGGUCCCGAGCAAGAAGUUCAAGGUCCUGGGAAACACAGACAGACACAGCAUCAAGAAGAACCUG |
| | without start | AUCGGAGCACUGCUGUUCGACAGCGGAGAAACAGCAGAAGCAACAAGACUGAAGAGAACAGCAAGAAGA |
| | or stop codons | AGAUACACAAGAAGAAAGAACAGAAUCUGCUACCUGCAGGAAAUCUUCAGCAACGAAAUGGCAAAGGUC |
| | | GACGACAGCUUCUUCCACAGACUGGAAGAAAGCUUCCUGGUCGAAGAAGACAAGAAGCACGAAAGACAC |
| | | CCGAUCUUCGGAAACAUCGUCGACGAAGUCGCAUACCACGAAAAGUACCCGACAAUCUACCACCUGAGAA |
| | | AGAAGCUGGUCGACAGCACAGACAAGGCAGACCUGAGACUGAUCUACCUGGCACUGGCACACAUGAUCA |
| | | AGUUCAGAGGACACUUCCUGAUCGAAGGAGACCUGAACCCGGACAACAGCGACGUCGACAAGCUGUUCA |
| | | UCCAGCUGGUCCAGACAUACAACCAGCUGUUCGAAGAAAACCCGAUCAACGCAAGCGGAGUCGACGCAA |
| | | AGGCAAUCCUGAGCGCAAGACUGAGCAAGAGCAGAAGACUGGAAAACCUGAUCGCACAGCUGCCGGGAG |
| | | AAAAGAAGAACGGACUGUUCGGAAACCUGAUCGCACUGAGCCUGGGACUGACACCGAACUUCAAGAGCA |
| | | ACUUCGACCUGGCAGAAGACGCAAAGCUGCAGCUGAGCAAGGACACAUACGACGACGACCUGGACAACC |
| | | UGCUGGCACAGAUCGGAGACCAGUACGCAGACCUGUUCCUGGCAGCAAAGAACCUGAGCGACGCAAUCC |
| | | UGCUGAGCGACAUCCUGAGAGUCAACACAGAAAUCACAAAGGCACCGCUGAGCGCAAGCAUGAUCAAGA |
| | | GAUACGACGAACACCACCAGGACCUGACACUGCUGAAGGCACUGGUCAGACAGCAGCUGCCGGAAAAGU |
| | | ACAAGGAAAUCUUCUUCGACCAGAGCAAGAACGGAUACGCAGGAUACAUCGACGGAGGAGCAAGCCAGG |
| | | AAGAAUUCUACAAGUUCAUCAAGCCGAUCCUGGAAAAGAUGGACGGAACAGAAGAACUGCUGGUCAAGC |
| | | UGAACAGAGAAGACCUGCUGAGAAAGCAGAGAACAUUCGACAACGGAAGCAUCCCGCACCAGAUCCACC |
| | | UGGGAGAACUGCACGCAAUCCUGAGAAGACAGGAAGACUUCUACCCGUUCCUGAAGGACAACAGAGAAA |
| | | AGAUCGAAAAGAUCCUGACAUUCAGAAUCCCGUACUACGUCGGACCGCUGGCAAGAGGAAACAGCAGAU |
| | | UCGCAUGGAUGACAAGAAAGAGCGAAGAAACAAUCACACCGUGGAACUUCGAAGAAGUCGUCGACAAGG |
| | | GAGCAAGCGCACAGAGCUUCAUCGAAAGAAUGACAAACUUCGACAAGAACCUGCCGAACGAAAAGGUCC |
| | | UGCCGAAGCACAGCCUGCUGUACGAAUACUUCACAGUCUACAACGAACUGACAAAGGUCAAGUACGUCA |
| | | CAGAAGGAAUGAGAAAGCCGGCAUUCCUGAGCGGAGAACAGAAGAAGGCAAUCGUCGACCUGCUGUUCA |
| | | AGACAAACAGAAAGGUCACAGUCAAGCAGCUGAAGGAAGACUACUUCAAGAAGAUCGAAUGCUUCGACA |
| | | GCGUCGAAAUCAGCGGAGUCGAAGACAGAUUCAACGCAAGCCUGGGAACAUACCACGACCUGCUGAAGA |
| | | UCAUCAAGGACAAGGACUUCCUGGACAACGAAGAAAACGAAGACAUCCUGGAAGACAUCGUCCUGACAC |
| | | UGACACUGUUCGAAGACAGAGAAAUGAUCGAAGAAAGACUGAAGACAUACGCACACCUGUUCGACGACA |
| | | AGGUCAUGAAGCAGCUGAAGAGAAGAAGAUACACAGGAUGGGGAAGACUGAGCAGAAAGCUGAUCAACG |
| | | GAAUCAGAGACAAGCAGAGCGGAAAGACAAUCCUGGACUUCCUGAAGAGCGACGGAUUCGCAAACAGAA |
| | | ACUUCAUGCAGCUGAUCCACGACGACAGCCUGACAUUCAAGGAAGACAUCCAGAAGGCACAGGUCAGCG |
| | | GACAGGGAGACAGCCUGCACGAACACAUCGCAAACCUGGCAGGAAGCCCGGCAAUCAAGAAGGGAAUCC |
| | | UGCAGACAGUCAAGGUCGUCGACGAACUGGUCAAGGUCAUGGGAAGACACAAGCCGGAAAACAUCGUCA |
| | | UCGAAAUGGCAAGAGAAAACCAGACAACACAGAAGGGACAGAAGAACAGCAGAGAAAGAAUGAAGAGAA |
| | | UCGAAGAAGGAAUCAAGGAACUGGGAAGCCAGAUCCUGAAGGAACACCCGGUCGAAAACACACAGCUGC |
| | | AGAACGAAAAGCUGUACCUGUACUACCUGCAGAACGGAAGAGACAUGUACGUCGACCAGGAACUGGACA |
| | | UCAACAGACUGAGCGACUACGACGUCGACGCAAUCGUCCCGCAGAGCUUCCUGAAGGACGACAGCAUCGA |
| | | CAACAAGGUCCUGACAAGAAGCGACAAGAACAGAGGAAAGAGCGACAACGUCCCGAGCGAAGAAGUCGU |
| | | CAAGAAGAUGAAGAACUACUGGAGACAGCUGCUGAACGCAAAGCUGAUCACACAGAGAAAGUUCGACAA |
| | | CCUGACAAAGGCAGAGAGAGGAGGACUGAGCGAACUGGACAAGGCAGGAUUCAUCAAGAGACAGCUGGU |
| | | CGAAACAAGACAGAUCACAAAGCACGUCGCACAGAUCCUGGACAGCAGAAUGAACACAAAGUACGACGA |
| | | AAACGACAAGCUGAUCAGAGAAGUCAAGGUCAUCACACUGAAGAGCAAGCUGGUCAGCGACUUCAGAAA |
| | | GGACUUCCAGUUCUACAAGGUCAGAGAAAUCAACAACUACCACCACGCACACGACGCAUACCUGAACGCA |
| | | GUCGUCGGAACAGCACUGAUCAAGAAGUACCCGAAGCUGGAAAGCGAAUUCGUCUACGGAGACUACAAG |
| | | GUCUACGACGUCAGAAAGAUGAUCGCAAAGAGCGAACAGGAAAUCGGAAAGGCAACAGCAAAGUACUUC |
| | | UUCUACAGCAACAUCAUGAACUUCUUCAAGACAGAAAUCACACUGGCAAACGGAGAAAUCAGAAAGAGA |
| | | CCGCUGAUCGAAACAAACGGAGAAACAGGAGAAAUCGUCUGGGACAAGGGAAGAGACUUCGCAACAGUC |
| | | AGAAAGGUCCUGAGCAUGCCGCAGGUCAACAUCGUCAAGAAGACAGAAGUCCAGACAGGAGGAUUCAGC |
| | | AAGGAAAGCAUCCUGCCGAAGAGAAACAGCGACAAGCUGAUCGCAAGAAAGAAGGACUGGGACCCGAAG |
| | | AAGUACGGAGGAUUCGACAGCCCGACAGUCGCAUACAGCGUCCUGGUCGUCGCAAAGGUCGAAAAGGGA |
| | | AAGAGCAAGAAGCUGAAGAGCGUCAAGGAACUGCUGGGAAUCACAAUCAUGGAAAGAAGCAGCUUCGAA |
| | | AAGAACCCGAUCGACUUCCUGGAAGCAAAGGGAUACAAGGAAGUCAAGAAGGACCUGAUCAUCAAGCUG |
| | | CCGAAGUACAGCCUGUUCGAACUGGAAAACGGAAGAAAGAGAAUGCUGGCAAGCGCAGGAGAACUGCAG |
| | | AAGGGAAACGAACUGGCACUGCCGAGCAAGUACGUCAACUUCCUGUACCUGGCAAGCCACUACGAAAAG |
| | | CUGAAGGGAAGCCCGGAAGACAACGAACAGAAGCAGCUGUUCGUCGAACAGCACAAGCACUACCUGGAC |
| | | GAAAUCAUCGAACAGAUCAGCGAAUUCAGCAAGAGAGUCAUCCUGGCAGACGCAAACCUGGACAAGGUC |
| | | CUGAGCGCAUACAACAAGCACAGAGACAAGCCGAUCAGAGAACAGGCAGAAAACAUCAUCCACCUGUUC |
| | | ACACUGACAAACCUGGGAGCACCGGCAGCAUUCAAGUACUUCGACACAACAAUCGACAGAAAGAGAUAC |
| | | ACAAGCACAAAGGAAGUCCUGGACGCAACACUGAUCCACCAGAGCAUCACAGGACUGUACGAAACAAGA |
| | | AUCGACCUGAGCCAGCUGGGAGGAGACGGAGGAGGAAGCCCGAAGAAGAAGAGAAAGGUC |
| 1111 | Cas9 mRNA ORF | AUGGACAAGAAGUACAGCAUCGGACUGGACAUCGGAACAAACAGCGUCGGAUGGGCAGUCAUCACAGAC |
| | | GAAUACAAGGUCCCGAGCAAGAAGUUCAAGGUCCUGGGAAACACAGACAGACACAGCAUCAAGAAGAAC |
| | | CUGAUCGGAGCACUGCUGUUCGACAGCGGAGAAACAGCAGAAGCAACAAGACUGAAGAGAACAGCAAGA |
| | | AGAAGAUACACAAGAAGAAAGAACAGAAUCUGCUACCUGCAGGAAAUCUUCAGCAACGAAAUGGCAAAG |
| | | GUCGACGACAGCUUCUUCCACAGACUGGAAGAAAGCUUCCUGGUCGAAGAAGACAAGAAGCACGAAAGA |
| | | CACCCGAUCUUCGGAAACAUCGUCGACGAAGUCGCAUACCACGAAAAGUACCCGACAAUCUACCACCUGA |
| | | GAAAGAAGCUGGUCGACAGCACAGACAAGGCAGACCUGAGACUGAUCUACCUGGCACUGGCACACAUGA |
| | | UCAAGUUCAGAGGACACUUCCUGAUCGAAGGAGACCUGAACCCGGACAACAGCGACGUCGACAAGCUGU |
| | | UCAUCCAGCUGGUCCAGACAUACAACCAGCUGUUCGAAGAAAACCCGAUCAACGCAAGCGGAGUCGACGC |
| | | AAAGGCAAUCCUGAGCGCAAGACUGAGCAAGAGCAGAAGACUGGAAAACCUGAUCGCACAGCUGCCGGG |
| | | AGAAAAGAAGAACGGACUGUUCGGAAACCUGAUCGCACUGAGCCUGGGACUGACACCGAACUUCAAGAG |
| | | CAACUUCGACCUGGCAGAAGACGCAAAGCUGCAGCUGAGCAAGGACACAUACGACGACGACCUGGACAA |
| | | CCUGCUGGCACAGAUCGGAGACCAGUACGCAGACCUGUUCCUGGCAGCAAAGAACCUGAGCGACGCAAUC |
| | | CUGCUGAGCGACAUCCUGAGAGUCAACACAGAAAUCACAAAGGCACCGCUGAGCGCAAGCAUGAUCAAG |
| | | AGAUACGACGAACACCACCAGGACCUGACACUGCUGAAGGCACUGGUCAGACAGCAGCUGCCGGAAAAG |
| | | UACAAGGAAAUCUUCUUCGACCAGAGCAAGAACGGAUACGCAGGAUACAUCGACGGAGGAGCAAGCCAG |
| | | GAAGAAUUCUACAAGUUCAUCAAGCCGAUCCUGGAAAAGAUGGACGGAACAGAAGAACUGCUGGUCAAG |
| | | CUGAACAGAGAAGACCUGCUGAGAAAGCAGAGAACAUUCGACAACGGAAGCAUCCCGCACCAGAUCCAC |
| | | CUGGGAGAACUGCACGCAAUCCUGAGAAGACAGGAAGACUUCUACCCGUUCCUGAAGGACAACAGAGAA |
| | | AAGAUCGAAAAGAUCCUGACAUUCAGAAUCCCGUACUACGUCGGACCGCUGGCAAGAGGAAACAGCAGA |
| | | UUCGCAUGGAUGACAAGAAAGAGCGAAGAAACAAUCACACCGUGGAACUUCGAAGAAGUCGUCGACAAG |
| | | GGAGCAAGCGCACAGAGCUUCAUCGAAAGAAUGACAAACUUCGACAAGAACCUGCCGAACGAAAAGGUC |
| | | CUGCCGAAGCACAGCCUGCUGUACGAAUACUUCACAGUCUACAACGAACUGACAAAGGUCAAGUACGUC |
| | | ACAGAAGGAAUGAGAAAGCCGGCAUUCCUGAGCGGAGAACAGAAGAAGGCAAUCGUCGACCUGCUGUUC |
| | | AAGACAAACAGAAAGGUCACAGUCAAGCAGCUGAAGGAAGACUACUUCAAGAAGAUCGAAUGCUUCGAC |
| | | AGCGUCGAAAUCAGCGGAGUCGAAGACAGAUUCAACGCAAGCCUGGGAACAUACCACGACCUGCUGAAG |
| | | AUCAUCAAGGACAAGGACUUCCUGGACAACGAAGAAAACGAAGACAUCCUGGAAGACAUCGUCCUGACA |
| | | CUGACACUGUUCGAAGACAGAGAAAUGAUCGAAGAAAGACUGAAGACAUACGCACACCUGUUCGACGAC |
| | | AAGGUCAUGAAGCAGCUGAAGAGAAGAAGAUACACAGGAUGGGGAAGACUGAGCAGAAAGCUGAUCAAC |
| | | GGAAUCAGAGACAAGCAGAGCGGAAAGACAAUCCUGGACUUCCUGAAGAGCGACGGAUUCGCAAACAGA |
| | | AACUUCAUGCAGCUGAUCCACGACGACAGCCUGACAUUCAAGGAAGACAUCCAGAAGGCACAGGUCAGC |
| | | GGACAGGGAGACAGCCUGCACGAACACAUCGCAAACCUGGCAGGAAGCCCGGCAAUCAAGAAGGGAAUC |
| | | CUGCAGACAGUCAAGGUCGUCGACGAACUGGUCAAGGUCAUGGGAAGACACAAGCCGGAAAACAUCGUC |
| | | AUCGAAAUGGCAAGAGAAAACCAGACAACACAGAAGGGACAGAAGAACAGCAGAGAAAGAAUGAAGAGA |
| | | AUCGAAGAAGGAAUCAAGGAACUGGGAAGCCAGAUCCUGAAGGAACACCCGGUCGAAAACACACAGCUG |
| | | CAGAACGAAAAGCUGUACCUGUACUACCUGCAGAACGGAAGAGACAUGUACGUCGACCAGGAACUGGAC |
| | | AUCAACAGACUGAGCGACUACGACGUCGACCACAUCGUCCCGCAGAGCUUCCUGAAGGACGACAGCAUCG |
| | | ACAACAAGGUCCUGACAAGAAGCGACAAGAACAGAGGAAAGAGCGACAACGUCCCGAGCGAAGAAGUCG |
| | | UCAAGAAGAUGAAGAACUACUGGAGACAGCUGCUGAACGCAAAGCUGAUCACACAGAGAAAGUUCGACA |
| | | ACCUGACAAAGGCAGAGAGAGGAGGACUGAGCGAACUGGACAAGGCAGGAUUCAUCAAGAGACAGCUGG |
| | | UCGAAACAAGACAGAUCACAAAGCACGUCGCACAGAUCCUGGACAGCAGAAUGAACACAAAGUACGACG |
| | | AAAACGACAAGCUGAUCAGAGAAGUCAAGGUCAUCACACUGAAGAGCAAGCUGGUCAGCGACUUCAGAA |
| | | AGGACUUCCAGUUCUACAAGGUCAGAGAAAUCAACAACUACCACCACGCACACGACGCAUACCUGAACGC |
| | | AGUCGUCGGAACAGCACUGAUCAAGAAGUACCCGAAGCUGGAAAGCGAAUUCGUCUACGGAGACUACAA |
| | | GGUCUACGACGUCAGAAAGAUGAUCGCAAAGAGCGAACAGGAAAUCGGAAAGGCAACAGCAAAGUACUU |
| | | CUUCUACAGCAACAUCAUGAACUUCUUCAAGACAGAAAUCACACUGGCAAACGGAGAAAUCAGAAAGAG |
| | | ACCGCUGAUCGAAACAAACGGAGAAACAGGAGAAAUCGUCUGGGACAAGGGAAGAGACUUCGCAACAGU |
| | | CAGAAAGGUCCUGAGCAUGCCGCAGGUCAACAUCGUCAAGAAGACAGAAGUCCAGACAGGAGGAUUCAG |
| | | CAAGGAAAGCAUCCUGCCGAAGAGAAACAGCGACAAGCUGAUCGCAAGAAAGAAGGACUGGGACCCGAA |
| | | GAAGUACGGAGGAUUCGACAGCCCGACAGUCGCAUACAGCGUCCUGGUCGUCGCAAAGGUCGAAAAGGG |
| | | AAAGAGCAAGAAGCUGAAGAGCGUCAAGGAACUGCUGGGAAUCACAAUCAUGGAAAGAAGCAGCUUCGA |
| | | AAAGAACCCGAUCGACUUCCUGGAAGCAAAGGGAUACAAGGAAGUCAAGAAGGACCUGAUCAUCAAGCU |
| | | GCCGAAGUACAGCCUGUUCGAACUGGAAAACGGAAGAAAGAGAAUGCUGGCAAGCGCAGGAGAACUGCA |
| | | GAAGGGAAACGAACUGGCACUGCCGAGCAAGUACGUCAACUUCCUGUACCUGGCAAGCCACUACGAAAA |
| | | GCUGAAGGGAAGCCCGGAAGACAACGAACAGAAGCAGCUGUUCGUCGAACAGCACAAGCACUACCUGGA |
| | | CGAAAUCAUCGAACAGAUCAGCGAAUUCAGCAAGAGAGUCAUCCUGGCAGACGCAAACCUGGACAAGGU |
| | | CCUGAGCGCAUACAACAAGCACAGAGACAAGCCGAUCAGAGAACAGGCAGAAAACAUCAUCCACCUGUU |
| | | CACACUGACAAACCUGGGAGCACCGGCAGCAUUCAAGUACUUCGACACAACAAUCGACAGAAAGAGAUA |
| | | CACAAGCACAAAGGAAGUCCUGGACGCAACACUGAUCCACCAGAGCAUCACAGGACUGUACGAAACAAG |
| | | AAUCGACCUGAGCCAGCUGGGAGGAGACUAG |
| 1112 | Cas9 coding | GACAAGAAGUACAGCAUCGGACUGGACAUCGGAACAAACAGCGUCGGAUGGGCAGUCAUCACAGACGAA |
| | sequence, | UACAAGGUCCCGAGCAAGAAGUUCAAGGUCCUGGGAAACACAGACAGACACAGCAUCAAGAAGAACCUG |
| | without | AUCGGAGCACUGCUGUUCGACAGCGGAGAAACAGCAGAAGCAACAAGACUGAAGAGAACAGCAAGAAGA |
| | start or stop | AGAUACACAAGAAGAAAGAACAGAAUCUGCUACCUGCAGGAAAUCUUCAGCAACGAAAUGGCAAAGGUC |
| | codons | GACGACAGCUUCUUCCACAGACUGGAAGAAAGCUUCCUGGUCGAAGAAGACAAGAAGCACGAAAGACAC |
| | | CCGAUCUUCGGAAACAUCGUCGACGAAGUCGCAUACCACGAAAAGUACCCGACAAUCUACCACCUGAGAA |
| | | AGAAGCUGGUCGACAGCACAGACAAGGCAGACCUGAGACUGAUCUACCUGGCACUGGCACACAUGAUCA |
| | | AGUUCAGAGGACACUUCCUGAUCGAAGGAGACCUGAACCCGGACAACAGCGACGUCGACAAGCUGUUCA |
| | | UCCAGCUGGUCCAGACAUACAACCAGCUGUUCGAAGAAAACCCGAUCAACGCAAGCGGAGUCGACGCAA |
| | | AGGCAAUCCUGAGCGCAAGACUGAGCAAGAGCAGAAGACUGGAAAACCUGAUCGCACAGCUGCCGGGAG |
| | | AAAAGAAGAACGGACUGUUCGGAAACCUGAUCGCACUGAGCCUGGGACUGACACCGAACUUCAAGAGCA |
| | | ACUUCGACCUGGCAGAAGACGCAAAGCUGCAGCUGAGCAAGGACACAUACGACGACGACCUGGACAACC |
| | | UGCUGGCACAGAUCGGAGACCAGUACGCAGACCUGUUCCUGGCAGCAAAGAACCUGAGCGACGCAAUCC |
| | | UGCUGAGCGACAUCCUGAGAGUCAACACAGAAAUCACAAAGGCACCGCUGAGCGCAAGCAUGAUCAAGA |
| | | GAUACGACGAACACCACCAGGACCUGACACUGCUGAAGGCACUGGUCAGACAGCAGCUGCCGGAAAAGU |
| | | ACAAGGAAAUCUUCUUCGACCAGAGCAAGAACGGAUACGCAGGAUACAUCGACGGAGGAGCAAGCCAGG |
| | | AAGAAUUCUACAAGUUCAUCAAGCCGAUCCUGGAAAAGAUGGACGGAACAGAAGAACUGCUGGUCAAGC |
| | | UGAACAGAGAAGACCUGCUGAGAAAGCAGAGAACAUUCGACAACGGAAGCAUCCCGCACCAGAUCCACC |
| | | UGGGAGAACUGCACGCAAUCCUGAGAAGACAGGAAGACUUCUACCCGUUCCUGAAGGACAACAGAGAAA |
| | | AGAUCGAAAAGAUCCUGACAUUCAGAAUCCCGUACUACGUCGGACCGCUGGCAAGAGGAAACAGCAGAU |
| | | UCGCAUGGAUGACAAGAAAGAGCGAAGAAACAAUCACACCGUGGAACUUCGAAGAAGUCGUCGACAAGG |
| | | GAGCAAGCGCACAGAGCUUCAUCGAAAGAAUGACAAACUUCGACAAGAACCUGCCGAACGAAAAGGUCC |
| | | UGCCGAAGCACAGCCUGCUGUACGAAUACUUCACAGUCUACAACGAACUGACAAAGGUCAAGUACGUCA |
| | | CAGAAGGAAUGAGAAAGCCGGCAUUCCUGAGCGGAGAACAGAAGAAGGCAAUCGUCGACCUGCUGUUCA |
| | | AGACAAACAGAAAGGUCACAGUCAAGCAGCUGAAGGAAGACUACUUCAAGAAGAUCGAAUGCUUCGACA |
| | | GCGUCGAAAUCAGCGGAGUCGAAGACAGAUUCAACGCAAGCCUGGGAACAUACCACGACCUGCUGAAGA |
| | | UCAUCAAGGACAAGGACUUCCUGGACAACGAAGAAAACGAAGACAUCCUGGAAGACAUCGUCCUGACAC |
| | | UGACACUGUUCGAAGACAGAGAAAUGAUCGAAGAAAGACUGAAGACAUACGCACACCUGUUCGACGACA |
| | | AGGUCAUGAAGCAGCUGAAGAGAAGAAGAUACACAGGAUGGGGAAGACUGAGCAGAAAGCUGAUCAACG |
| | | GAAUCAGAGACAAGCAGAGCGGAAAGACAAUCCUGGACUUCCUGAAGAGCGACGGAUUCGCAAACAGAA |
| | | ACUUCAUGCAGCUGAUCCACGACGACAGCCUGACAUUCAAGGAAGACAUCCAGAAGGCACAGGUCAGCG |
| | | GACAGGGAGACAGCCUGCACGAACACAUCGCAAACCUGGCAGGAAGCCCGGCAAUCAAGAAGGGAAUCC |
| | | UGCAGACAGUCAAGGUCGUCGACGAACUGGUCAAGGUCAUGGGAAGACACAAGCCGGAAAACAUCGUCA |
| | | UCGAAAUGGCAAGAGAAAACCAGACAACACAGAAGGGACAGAAGAACAGCAGAGAAAGAAUGAAGAGAA |
| | | UCGAAGAAGGAAUCAAGGAACUGGGAAGCCAGAUCCUGAAGGAACACCCGGUCGAAAACACACAGCUGC |
| | | AGAACGAAAAGCUGUACCUGUACUACCUGCAGAACGGAAGAGACAUGUACGUCGACCAGGAACUGGACA |
| | | UCAACAGACUGAGCGACUACGACGUCGACCACAUCGUCCCGCAGAGCUUCCUGAAGGACGACAGCAUCGA |
| | | CAACAAGGUCCUGACAAGAAGCGACAAGAACAGAGGAAAGAGCGACAACGUCCCGAGCGAAGAAGUCGU |
| | | CAAGAAGAUGAAGAACUACUGGAGACAGCUGCUGAACGCAAAGCUGAUCACACAGAGAAAGUUCGACAA |
| | | CCUGACAAAGGCAGAGAGAGGAGGACUGAGCGAACUGGACAAGGCAGGAUUCAUCAAGAGACAGCUGGU |
| | | CGAAACAAGACAGAUCACAAAGCACGUCGCACAGAUCCUGGACAGCAGAAUGAACACAAAGUACGACGA |
| | | AAACGACAAGCUGAUCAGAGAAGUCAAGGUCAUCACACUGAAGAGCAAGCUGGUCAGCGACUUCAGAAA |
| | | GGACUUCCAGUUCUACAAGGUCAGAGAAAUCAACAACUACCACCACGCACACGACGCAUACCUGAACGCA |
| | | GUCGUCGGAACAGCACUGAUCAAGAAGUACCCGAAGCUGGAAAGCGAAUUCGUCUACGGAGACUACAAG |
| | | GUCUACGACGUCAGAAAGAUGAUCGCAAAGAGCGAACAGGAAAUCGGAAAGGCAACAGCAAAGUACUUC |
| | | UUCUACAGCAACAUCAUGAACUUCUUCAAGACAGAAAUCACACUGGCAAACGGAGAAAUCAGAAAGAGA |
| | | CCGCUGAUCGAAACAAACGGAGAAACAGGAGAAAUCGUCUGGGACAAGGGAAGAGACUUCGCAACAGUC |
| | | AGAAAGGUCCUGAGCAUGCCGCAGGUCAACAUCGUCAAGAAGACAGAAGUCCAGACAGGAGGAUUCAGC |
| | | AAGGAAAGCAUCCUGCCGAAGAGAAACAGCGACAAGCUGAUCGCAAGAAAGAAGGACUGGGACCCGAAG |
| | | AAGUACGGAGGAUUCGACAGCCCGACAGUCGCAUACAGCGUCCUGGUCGUCGCAAAGGUCGAAAAGGGA |
| | | AAGAGCAAGAAGCUGAAGAGCGUCAAGGAACUGCUGGGAAUCACAAUCAUGGAAAGAAGCAGCUUCGAA |
| | | AAGAACCCGAUCGACUUCCUGGAAGCAAAGGGAUACAAGGAAGUCAAGAAGGACCUGAUCAUCAAGCUG |
| | | CCGAAGUACAGCCUGUUCGAACUGGAAAACGGAAGAAAGAGAAUGCUGGCAAGCGCAGGAGAACUGCAG |
| | | AAGGGAAACGAACUGGCACUGCCGAGCAAGUACGUCAACUUCCUGUACCUGGCAAGCCACUACGAAAAG |
| | | CUGAAGGGAAGCCCGGAAGACAACGAACAGAAGCAGCUGUUCGUCGAACAGCACAAGCACUACCUGGAC |
| | | GAAAUCAUCGAACAGAUCAGCGAAUUCAGCAAGAGAGUCAUCCUGGCAGACGCAAACCUGGACAAGGUC |
| | | CUGAGCGCAUACAACAAGCACAGAGACAAGCCGAUCAGAGAACAGGCAGAAAACAUCAUCCACCUGUUC |
| | | ACACUGACAAACCUGGGAGCACCGGCAGCAUUCAAGUACUUCGACACAACAAUCGACAGAAAGAGAUAC |
| | | ACAAGCACAAAGGAAGUCCUGGACGCAACACUGAUCCACCAGAGCAUCACAGGACUGUACGAAACAAGA |
| | | AUCGACCUGAGCCAGCUGGGAGGAGAC |
| 1113 | Cas9 nickase | AUGGACAAGAAGUACAGCAUCGGACUGGCAAUCGGAACAAACAGCGUCGGAUGGGCAGUCAUCACAGAC |
| | mRNA ORF | GAAUACAAGGUCCCGAGCAAGAAGUUCAAGGUCCUGGGAAACACAGACAGACACAGCAUCAAGAAGAAC |
| | | CUGAUCGGAGCACUGCUGUUCGACAGCGGAGAAACAGCAGAAGCAACAAGACUGAAGAGAACAGCAAGA |
| | | AGAAGAUACACAAGAAGAAAGAACAGAAUCUGCUACCUGCAGGAAAUCUUCAGCAACGAAAUGGCAAAG |
| | | GUCGACGACAGCUUCUUCCACAGACUGGAAGAAAGCUUCCUGGUCGAAGAAGACAAGAAGCACGAAAGA |
| | | CACCCGAUCUUCGGAAACAUCGUCGACGAAGUCGCAUACCACGAAAAGUACCCGACAAUCUACCACCUGA |
| | | GAAAGAAGCUGGUCGACAGCACAGACAAGGCAGACCUGAGACUGAUCUACCUGGCACUGGCACACAUGA |
| | | UCAAGUUCAGAGGACACUUCCUGAUCGAAGGAGACCUGAACCCGGACAACAGCGACGUCGACAAGCUGU |
| | | UCAUCCAGCUGGUCCAGACAUACAACCAGCUGUUCGAAGAAAACCCGAUCAACGCAAGCGGAGUCGACGC |
| | | AAAGGCAAUCCUGAGCGCAAGACUGAGCAAGAGCAGAAGACUGGAAAACCUGAUCGCACAGCUGCCGGG |
| | | AGAAAAGAAGAACGGACUGUUCGGAAACCUGAUCGCACUGAGCCUGGGACUGACACCGAACUUCAAGAG |
| | | CAACUUCGACCUGGCAGAAGACGCAAAGCUGCAGCUGAGCAAGGACACAUACGACGACGACCUGGACAA |
| | | CCUGCUGGCACAGAUCGGAGACCAGUACGCAGACCUGUUCCUGGCAGCAAAGAACCUGAGCGACGCAAUC |
| | | CUGCUGAGCGACAUCCUGAGAGUCAACACAGAAAUCACAAAGGCACCGCUGAGCGCAAGCAUGAUCAAG |
| | | AGAUACGACGAACACCACCAGGACCUGACACUGCUGAAGGCACUGGUCAGACAGCAGCUGCCGGAAAAG |
| | | UACAAGGAAAUCUUCUUCGACCAGAGCAAGAACGGAUACGCAGGAUACAUCGACGGAGGAGCAAGCCAG |
| | | GAAGAAUUCUACAAGUUCAUCAAGCCGAUCCUGGAAAAGAUGGACGGAACAGAAGAACUGCUGGUCAAG |
| | | CUGAACAGAGAAGACCUGCUGAGAAAGCAGAGAACAUUCGACAACGGAAGCAUCCCGCACCAGAUCCAC |
| | | CUGGGAGAACUGCACGCAAUCCUGAGAAGACAGGAAGACUUCUACCCGUUCCUGAAGGACAACAGAGAA |
| | | AAGAUCGAAAAGAUCCUGACAUUCAGAAUCCCGUACUACGUCGGACCGCUGGCAAGAGGAAACAGCAGA |
| | | UUCGCAUGGAUGACAAGAAAGAGCGAAGAAACAAUCACACCGUGGAACUUCGAAGAAGUCGUCGACAAG |
| | | GGAGCAAGCGCACAGAGCUUCAUCGAAAGAAUGACAAACUUCGACAAGAACCUGCCGAACGAAAAGGUC |
| | | CUGCCGAAGCACAGCCUGCUGUACGAAUACUUCACAGUCUACAACGAACUGACAAAGGUCAAGUACGUC |
| | | ACAGAAGGAAUGAGAAAGCCGGCAUUCCUGAGCGGAGAACAGAAGAAGGCAAUCGUCGACCUGCUGUUC |
| | | AAGACAAACAGAAAGGUCACAGUCAAGCAGCUGAAGGAAGACUACUUCAAGAAGAUCGAAUGCUUCGAC |
| | | AGCGUCGAAAUCAGCGGAGUCGAAGACAGAUUCAACGCAAGCCUGGGAACAUACCACGACCUGCUGAAG |
| | | AUCAUCAAGGACAAGGACUUCCUGGACAACGAAGAAAACGAAGACAUCCUGGAAGACAUCGUCCUGACA |
| | | CUGACACUGUUCGAAGACAGAGAAAUGAUCGAAGAAAGACUGAAGACAUACGCACACCUGUUCGACGAC |
| | | AAGGUCAUGAAGCAGCUGAAGAGAAGAAGAUACACAGGAUGGGGAAGACUGAGCAGAAAGCUGAUCAAC |
| | | GGAAUCAGAGACAAGCAGAGCGGAAAGACAAUCCUGGACUUCCUGAAGAGCGACGGAUUCGCAAACAGA |
| | | AACUUCAUGCAGCUGAUCCACGACGACAGCCUGACAUUCAAGGAAGACAUCCAGAAGGCACAGGUCAGC |
| | | GGACAGGGAGACAGCCUGCACGAACACAUCGCAAACCUGGCAGGAAGCCCGGCAAUCAAGAAGGGAAUC |
| | | CUGCAGACAGUCAAGGUCGUCGACGAACUGGUCAAGGUCAUGGGAAGACACAAGCCGGAAAACAUCGUC |
| | | AUCGAAAUGGCAAGAGAAAACCAGACAACACAGAAGGGACAGAAGAACAGCAGAGAAAGAAUGAAGAGA |
| | | AUCGAAGAAGGAAUCAAGGAACUGGGAAGCCAGAUCCUGAAGGAACACCCGGUCGAAAACACACAGCUG |
| | | CAGAACGAAAAGCUGUACCUGUACUACCUGCAGAACGGAAGAGACAUGUACGUCGACCAGGAACUGGAC |
| | | AUCAACAGACUGAGCGACUACGACGUCGACCACAUCGUCCCGCAGAGCUUCCUGAAGGACGACAGCAUCG |
| | | ACAACAAGGUCCUGACAAGAAGCGACAAGAACAGAGGAAAGAGCGACAACGUCCCGAGCGAAGAAGUCG |
| | | UCAAGAAGAUGAAGAACUACUGGAGACAGCUGCUGAACGCAAAGCUGAUCACACAGAGAAAGUUCGACA |
| | | ACCUGACAAAGGCAGAGAGAGGAGGACUGAGCGAACUGGACAAGGCAGGAUUCAUCAAGAGACAGCUGG |
| | | UCGAAACAAGACAGAUCACAAAGCACGUCGCACAGAUCCUGGACAGCAGAAUGAACACAAAGUACGACG |
| | | AAAACGACAAGCUGAUCAGAGAAGUCAAGGUCAUCACACUGAAGAGCAAGCUGGUCAGCGACUUCAGAA |
| | | AGGACUUCCAGUUCUACAAGGUCAGAGAAAUCAACAACUACCACCACGCACACGACGCAUACCUGAACGC |
| | | AGUCGUCGGAACAGCACUGAUCAAGAAGUACCCGAAGCUGGAAAGCGAAUUCGUCUACGGAGACUACAA |
| | | GGUCUACGACGUCAGAAAGAUGAUCGCAAAGAGCGAACAGGAAAUCGGAAAGGCAACAGCAAAGUACUU |
| | | CUUCUACAGCAACAUCAUGAACUUCUUCAAGACAGAAAUCACACUGGCAAACGGAGAAAUCAGAAAGAG |
| | | ACCGCUGAUCGAAACAAACGGAGAAACAGGAGAAAUCGUCUGGGACAAGGGAAGAGACUUCGCAACAGU |
| | | CAGAAAGGUCCUGAGCAUGCCGCAGGUCAACAUCGUCAAGAAGACAGAAGUCCAGACAGGAGGAUUCAG |
| | | CAAGGAAAGCAUCCUGCCGAAGAGAAACAGCGACAAGCUGAUCGCAAGAAAGAAGGACUGGGACCCGAA |
| | | GAAGUACGGAGGAUUCGACAGCCCGACAGUCGCAUACAGCGUCCUGGUCGUCGCAAAGGUCGAAAAGGG |
| | | AAAGAGCAAGAAGCUGAAGAGCGUCAAGGAACUGCUGGGAAUCACAAUCAUGGAAAGAAGCAGCUUCGA |
| | | AAAGAACCCGAUCGACUUCCUGGAAGCAAAGGGAUACAAGGAAGUCAAGAAGGACCUGAUCAUCAAGCU |
| | | GCCGAAGUACAGCCUGUUCGAACUGGAAAACGGAAGAAAGAGAAUGCUGGCAAGCGCAGGAGAACUGCA |
| | | GAAGGGAAACGAACUGGCACUGCCGAGCAAGUACGUCAACUUCCUGUACCUGGCAAGCCACUACGAAAA |
| | | GCUGAAGGGAAGCCCGGAAGACAACGAACAGAAGCAGCUGUUCGUCGAACAGCACAAGCACUACCUGGA |
| | | CGAAAUCAUCGAACAGAUCAGCGAAUUCAGCAAGAGAGUCAUCCUGGCAGACGCAAACCUGGACAAGGU |
| | | CCUGAGCGCAUACAACAAGCACAGAGACAAGCCGAUCAGAGAACAGGCAGAAAACAUCAUCCACCUGUU |
| | | CACACUGACAAACCUGGGAGCACCGGCAGCAUUCAAGUACUUCGACACAACAAUCGACAGAAAGAGAUA |
| | | CACAAGCACAAAGGAAGUCCUGGACGCAACACUGAUCCACCAGAGCAUCACAGGACUGUACGAAACAAG |
| | | AAUCGACCUGAGCCAGCUGGGAGGAGACUAG |
| 1114 | Cas9 nickase | GACAAGAAGUACAGCAUCGGACUGGCAAUCGGAACAAACAGCGUCGGAUGGGCAGUCAUCACAGACGAA |
| | coding sequence, | UACAAGGUCCCGAGCAAGAAGUUCAAGGUCCUGGGAAACACAGACAGACACAGCAUCAAGAAGAACCUG |
| | without start | AUCGGAGCACUGCUGUUCGACAGCGGAGAAACAGCAGAAGCAACAAGACUGAAGAGAACAGCAAGAAGA |
| | or stop codons | AGAUACACAAGAAGAAAGAACAGAAUCUGCUACCUGCAGGAAAUCUUCAGCAACGAAAUGGCAAAGGUC |
| | | GACGACAGCUUCUUCCACAGACUGGAAGAAAGCUUCCUGGUCGAAGAAGACAAGAAGCACGAAAGACAC |
| | | CCGAUCUUCGGAAACAUCGUCGACGAAGUCGCAUACCACGAAAAGUACCCGACAAUCUACCACCUGAGAA |
| | | AGAAGCUGGUCGACAGCACAGACAAGGCAGACCUGAGACUGAUCUACCUGGCACUGGCACACAUGAUCA |
| | | AGUUCAGAGGACACUUCCUGAUCGAAGGAGACCUGAACCCGGACAACAGCGACGUCGACAAGCUGUUCA |
| | | UCCAGCUGGUCCAGACAUACAACCAGCUGUUCGAAGAAAACCCGAUCAACGCAAGCGGAGUCGACGCAA |
| | | AGGCAAUCCUGAGCGCAAGACUGAGCAAGAGCAGAAGACUGGAAAACCUGAUCGCACAGCUGCCGGGAG |
| | | AAAAGAAGAACGGACUGUUCGGAAACCUGAUCGCACUGAGCCUGGGACUGACACCGAACUUCAAGAGCA |
| | | ACUUCGACCUGGCAGAAGACGCAAAGCUGCAGCUGAGCAAGGACACAUACGACGACGACCUGGACAACC |
| | | UGCUGGCACAGAUCGGAGACCAGUACGCAGACCUGUUCCUGGCAGCAAAGAACCUGAGCGACGCAAUCC |
| | | UGCUGAGCGACAUCCUGAGAGUCAACACAGAAAUCACAAAGGCACCGCUGAGCGCAAGCAUGAUCAAGA |
| | | GAUACGACGAACACCACCAGGACCUGACACUGCUGAAGGCACUGGUCAGACAGCAGCUGCCGGAAAAGU |
| | | ACAAGGAAAUCUUCUUCGACCAGAGCAAGAACGGAUACGCAGGAUACAUCGACGGAGGAGCAAGCCAGG |
| | | AAGAAUUCUACAAGUUCAUCAAGCCGAUCCUGGAAAAGAUGGACGGAACAGAAGAACUGCUGGUCAAGC |
| | | UGAACAGAGAAGACCUGCUGAGAAAGCAGAGAACAUUCGACAACGGAAGCAUCCCGCACCAGAUCCACC |
| | | UGGGAGAACUGCACGCAAUCCUGAGAAGACAGGAAGACUUCUACCCGUUCCUGAAGGACAACAGAGAAA |
| | | AGAUCGAAAAGAUCCUGACAUUCAGAAUCCCGUACUACGUCGGACCGCUGGCAAGAGGAAACAGCAGAU |
| | | UCGCAUGGAUGACAAGAAAGAGCGAAGAAACAAUCACACCGUGGAACUUCGAAGAAGUCGUCGACAAGG |
| | | GAGCAAGCGCACAGAGCUUCAUCGAAAGAAUGACAAACUUCGACAAGAACCUGCCGAACGAAAAGGUCC |
| | | UGCCGAAGCACAGCCUGCUGUACGAAUACUUCACAGUCUACAACGAACUGACAAAGGUCAAGUACGUCA |
| | | CAGAAGGAAUGAGAAAGCCGGCAUUCCUGAGCGGAGAACAGAAGAAGGCAAUCGUCGACCUGCUGUUCA |
| | | AGACAAACAGAAAGGUCACAGUCAAGCAGCUGAAGGAAGACUACUUCAAGAAGAUCGAAUGCUUCGACA |
| | | GCGUCGAAAUCAGCGGAGUCGAAGACAGAUUCAACGCAAGCCUGGGAACAUACCACGACCUGCUGAAGA |
| | | UCAUCAAGGACAAGGACUUCCUGGACAACGAAGAAAACGAAGACAUCCUGGAAGACAUCGUCCUGACAC |
| | | UGACACUGUUCGAAGACAGAGAAAUGAUCGAAGAAAGACUGAAGACAUACGCACACCUGUUCGACGACA |
| | | AGGUCAUGAAGCAGCUGAAGAGAAGAAGAUACACAGGAUGGGGAAGACUGAGCAGAAAGCUGAUCAACG |
| | | GAAUCAGAGACAAGCAGAGCGGAAAGACAAUCCUGGACUUCCUGAAGAGCGACGGAUUCGCAAACAGAA |
| | | ACUUCAUGCAGCUGAUCCACGACGACAGCCUGACAUUCAAGGAAGACAUCCAGAAGGCACAGGUCAGCG |
| | | GACAGGGAGACAGCCUGCACGAACACAUCGCAAACCUGGCAGGAAGCCCGGCAAUCAAGAAGGGAAUCC |
| | | UGCAGACAGUCAAGGUCGUCGACGAACUGGUCAAGGUCAUGGGAAGACACAAGCCGGAAAACAUCGUCA |
| | | UCGAAAUGGCAAGAGAAAACCAGACAACACAGAAGGGACAGAAGAACAGCAGAGAAAGAAUGAAGAGAA |
| | | UCGAAGAAGGAAUCAAGGAACUGGGAAGCCAGAUCCUGAAGGAACACCCGGUCGAAAACACACAGCUGC |
| | | AGAACGAAAAGCUGUACCUGUACUACCUGCAGAACGGAAGAGACAUGUACGUCGACCAGGAACUGGACA |
| | | UCAACAGACUGAGCGACUACGACGUCGACCACAUCGUCCCGCAGAGCUUCCUGAAGGACGACAGCAUCGA |
| | | CAACAAGGUCCUGACAAGAAGCGACAAGAACAGAGGAAAGAGCGACAACGUCCCGAGCGAAGAAGUCGU |
| | | CAAGAAGAUGAAGAACUACUGGAGACAGCUGCUGAACGCAAAGCUGAUCACACAGAGAAAGUUCGACAA |
| | | CCUGACAAAGGCAGAGAGAGGAGGACUGAGCGAACUGGACAAGGCAGGAUUCAUCAAGAGACAGCUGGU |
| | | CGAAACAAGACAGAUCACAAAGCACGUCGCACAGAUCCUGGACAGCAGAAUGAACACAAAGUACGACGA |
| | | AAACGACAAGCUGAUCAGAGAAGUCAAGGUCAUCACACUGAAGAGCAAGCUGGUCAGCGACUUCAGAAA |
| | | GGACUUCCAGUUCUACAAGGUCAGAGAAAUCAACAACUACCACCACGCACACGACGCAUACCUGAACGCA |
| | | GUCGUCGGAACAGCACUGAUCAAGAAGUACCCGAAGCUGGAAAGCGAAUUCGUCUACGGAGACUACAAG |
| | | GUCUACGACGUCAGAAAGAUGAUCGCAAAGAGCGAACAGGAAAUCGGAAAGGCAACAGCAAAGUACUUC |
| | | UUCUACAGCAACAUCAUGAACUUCUUCAAGACAGAAAUCACACUGGCAAACGGAGAAAUCAGAAAGAGA |
| | | CCGCUGAUCGAAACAAACGGAGAAACAGGAGAAAUCGUCUGGGACAAGGGAAGAGACUUCGCAACAGUC |
| | | AGAAAGGUCCUGAGCAUGCCGCAGGUCAACAUCGUCAAGAAGACAGAAGUCCAGACAGGAGGAUUCAGC |
| | | AAGGAAAGCAUCCUGCCGAAGAGAAACAGCGACAAGCUGAUCGCAAGAAAGAAGGACUGGGACCCGAAG |
| | | AAGUACGGAGGAUUCGACAGCCCGACAGUCGCAUACAGCGUCCUGGUCGUCGCAAAGGUCGAAAAGGGA |
| | | AAGAGCAAGAAGCUGAAGAGCGUCAAGGAACUGCUGGGAAUCACAAUCAUGGAAAGAAGCAGCUUCGAA |
| | | AAGAACCCGAUCGACUUCCUGGAAGCAAAGGGAUACAAGGAAGUCAAGAAGGACCUGAUCAUCAAGCUG |
| | | CCGAAGUACAGCCUGUUCGAACUGGAAAACGGAAGAAAGAGAAUGCUGGCAAGCGCAGGAGAACUGCAG |
| | | AAGGGAAACGAACUGGCACUGCCGAGCAAGUACGUCAACUUCCUGUACCUGGCAAGCCACUACGAAAAG |
| | | CUGAAGGGAAGCCCGGAAGACAACGAACAGAAGCAGCUGUUCGUCGAACAGCACAAGCACUACCUGGAC |
| | | GAAAUCAUCGAACAGAUCAGCGAAUUCAGCAAGAGAGUCAUCCUGGCAGACGCAAACCUGGACAAGGUC |
| | | CUGAGCGCAUACAACAAGCACAGAGACAAGCCGAUCAGAGAACAGGCAGAAAACAUCAUCCACCUGUUC |
| | | ACACUGACAAACCUGGGAGCACCGGCAGCAUUCAAGUACUUCGACACAACAAUCGACAGAAAGAGAUAC |
| | | ACAAGCACAAAGGAAGUCCUGGACGCAACACUGAUCCACCAGAGCAUCACAGGACUGUACGAAACAAGA |
| | | AUCGACCUGAGCCAGCUGGGAGGAGAC |
| 1115 | dCas9 mRNA ORF | AUGGACAAGAAGUACAGCAUCGGACUGGCAAUCGGAACAAACAGCGUCGGAUGGGCAGUCAUCACAGAC |
| | | GAAUACAAGGUCCCGAGCAAGAAGUUCAAGGUCCUGGGAAACACAGACAGACACAGCAUCAAGAAGAAC |
| | | CUGAUCGGAGCACUGCUGUUCGACAGCGGAGAAACAGCAGAAGCAACAAGACUGAAGAGAACAGCAAGA |
| | | AGAAGAUACACAAGAAGAAAGAACAGAAUCUGCUACCUGCAGGAAAUCUUCAGCAACGAAAUGGCAAAG |
| | | GUCGACGACAGCUUCUUCCACAGACUGGAAGAAAGCUUCCUGGUCGAAGAAGACAAGAAGCACGAAAGA |
| | | CACCCGAUCUUCGGAAACAUCGUCGACGAAGUCGCAUACCACGAAAAGUACCCGACAAUCUACCACCUGA |
| | | GAAAGAAGCUGGUCGACAGCACAGACAAGGCAGACCUGAGACUGAUCUACCUGGCACUGGCACACAUGA |
| | | UCAAGUUCAGAGGACACUUCCUGAUCGAAGGAGACCUGAACCCGGACAACAGCGACGUCGACAAGCUGU |
| | | UCAUCCAGCUGGUCCAGACAUACAACCAGCUGUUCGAAGAAAACCCGAUCAACGCAAGCGGAGUCGACGC |
| | | AAAGGCAAUCCUGAGCGCAAGACUGAGCAAGAGCAGAAGACUGGAAAACCUGAUCGCACAGCUGCCGGG |
| | | AGAAAAGAAGAACGGACUGUUCGGAAACCUGAUCGCACUGAGCCUGGGACUGACACCGAACUUCAAGAG |
| | | CAACUUCGACCUGGCAGAAGACGCAAAGCUGCAGCUGAGCAAGGACACAUACGACGACGACCUGGACAA |
| | | CCUGCUGGCACAGAUCGGAGACCAGUACGCAGACCUGUUCCUGGCAGCAAAGAACCUGAGCGACGCAAUC |
| | | CUGCUGAGCGACAUCCUGAGAGUCAACACAGAAAUCACAAAGGCACCGCUGAGCGCAAGCAUGAUCAAG |
| | | AGAUACGACGAACACCACCAGGACCUGACACUGCUGAAGGCACUGGUCAGACAGCAGCUGCCGGAAAAG |
| | | UACAAGGAAAUCUUCUUCGACCAGAGCAAGAACGGAUACGCAGGAUACAUCGACGGAGGAGCAAGCCAG |
| | | GAAGAAUUCUACAAGUUCAUCAAGCCGAUCCUGGAAAAGAUGGACGGAACAGAAGAACUGCUGGUCAAG |
| | | CUGAACAGAGAAGACCUGCUGAGAAAGCAGAGAACAUUCGACAACGGAAGCAUCCCGCACCAGAUCCAC |
| | | CUGGGAGAACUGCACGCAAUCCUGAGAAGACAGGAAGACUUCUACCCGUUCCUGAAGGACAACAGAGAA |
| | | AAGAUCGAAAAGAUCCUGACAUUCAGAAUCCCGUACUACGUCGGACCGCUGGCAAGAGGAAACAGCAGA |
| | | UUCGCAUGGAUGACAAGAAAGAGCGAAGAAACAAUCACACCGUGGAACUUCGAAGAAGUCGUCGACAAG |
| | | GGAGCAAGCGCACAGAGCUUCAUCGAAAGAAUGACAAACUUCGACAAGAACCUGCCGAACGAAAAGGUC |
| | | CUGCCGAAGCACAGCCUGCUGUACGAAUACUUCACAGUCUACAACGAACUGACAAAGGUCAAGUACGUC |
| | | ACAGAAGGAAUGAGAAAGCCGGCAUUCCUGAGCGGAGAACAGAAGAAGGCAAUCGUCGACCUGCUGUUC |
| | | AAGACAAACAGAAAGGUCACAGUCAAGCAGCUGAAGGAAGACUACUUCAAGAAGAUCGAAUGCUUCGAC |
| | | AGCGUCGAAAUCAGCGGAGUCGAAGACAGAUUCAACGCAAGCCUGGGAACAUACCACGACCUGCUGAAG |
| | | AUCAUCAAGGACAAGGACUUCCUGGACAACGAAGAAAACGAAGACAUCCUGGAAGACAUCGUCCUGACA |
| | | CUGACACUGUUCGAAGACAGAGAAAUGAUCGAAGAAAGACUGAAGACAUACGCACACCUGUUCGACGAC |
| | | AAGGUCAUGAAGCAGCUGAAGAGAAGAAGAUACACAGGAUGGGGAAGACUGAGCAGAAAGCUGAUCAAC |
| | | GGAAUCAGAGACAAGCAGAGCGGAAAGACAAUCCUGGACUUCCUGAAGAGCGACGGAUUCGCAAACAGA |
| | | AACUUCAUGCAGCUGAUCCACGACGACAGCCUGACAUUCAAGGAAGACAUCCAGAAGGCACAGGUCAGC |
| | | GGACAGGGAGACAGCCUGCACGAACACAUCGCAAACCUGGCAGGAAGCCCGGCAAUCAAGAAGGGAAUC |
| | | CUGCAGACAGUCAAGGUCGUCGACGAACUGGUCAAGGUCAUGGGAAGACACAAGCCGGAAAACAUCGUC |
| | | AUCGAAAUGGCAAGAGAAAACCAGACAACACAGAAGGGACAGAAGAACAGCAGAGAAAGAAUGAAGAGA |
| | | AUCGAAGAAGGAAUCAAGGAACUGGGAAGCCAGAUCCUGAAGGAACACCCGGUCGAAAACACACAGCUG |
| | | CAGAACGAAAAGCUGUACCUGUACUACCUGCAGAACGGAAGAGACAUGUACGUCGACCAGGAACUGGAC |
| | | AUCAACAGACUGAGCGACUACGACGUCGACGCAAUCGUCCCGCAGAGCUUCCUGAAGGACGACAGCAUCG |
| | | ACAACAAGGUCCUGACAAGAAGCGACAAGAACAGAGGAAAGAGCGACAACGUCCCGAGCGAAGAAGUCG |
| | | UCAAGAAGAUGAAGAACUACUGGAGACAGCUGCUGAACGCAAAGCUGAUCACACAGAGAAAGUUCGACA |
| | | ACCUGACAAAGGCAGAGAGAGGAGGACUGAGCGAACUGGACAAGGCAGGAUUCAUCAAGAGACAGCUGG |
| | | UCGAAACAAGACAGAUCACAAAGCACGUCGCACAGAUCCUGGACAGCAGAAUGAACACAAAGUACGACG |
| | | AAAACGACAAGCUGAUCAGAGAAGUCAAGGUCAUCACACUGAAGAGCAAGCUGGUCAGCGACUUCAGAA |
| | | AGGACUUCCAGUUCUACAAGGUCAGAGAAAUCAACAACUACCACCACGCACACGACGCAUACCUGAACGC |
| | | AGUCGUCGGAACAGCACUGAUCAAGAAGUACCCGAAGCUGGAAAGCGAAUUCGUCUACGGAGACUACAA |
| | | GGUCUACGACGUCAGAAAGAUGAUCGCAAAGAGCGAACAGGAAAUCGGAAAGGCAACAGCAAAGUACUU |
| | | CUUCUACAGCAACAUCAUGAACUUCUUCAAGACAGAAAUCACACUGGCAAACGGAGAAAUCAGAAAGAG |
| | | ACCGCUGAUCGAAACAAACGGAGAAACAGGAGAAAUCGUCUGGGACAAGGGAAGAGACUUCGCAACAGU |
| | | CAGAAAGGUCCUGAGCAUGCCGCAGGUCAACAUCGUCAAGAAGACAGAAGUCCAGACAGGAGGAUUCAG |
| | | CAAGGAAAGCAUCCUGCCGAAGAGAAACAGCGACAAGCUGAUCGCAAGAAAGAAGGACUGGGACCCGAA |
| | | GAAGUACGGAGGAUUCGACAGCCCGACAGUCGCAUACAGCGUCCUGGUCGUCGCAAAGGUCGAAAAGGG |
| | | AAAGAGCAAGAAGCUGAAGAGCGUCAAGGAACUGCUGGGAAUCACAAUCAUGGAAAGAAGCAGCUUCGA |
| | | AAAGAACCCGAUCGACUUCCUGGAAGCAAAGGGAUACAAGGAAGUCAAGAAGGACCUGAUCAUCAAGCU |
| | | GCCGAAGUACAGCCUGUUCGAACUGGAAAACGGAAGAAAGAGAAUGCUGGCAAGCGCAGGAGAACUGCA |
| | | GAAGGGAAACGAACUGGCACUGCCGAGCAAGUACGUCAACUUCCUGUACCUGGCAAGCCACUACGAAAA |
| | | GCUGAAGGGAAGCCCGGAAGACAACGAACAGAAGCAGCUGUUCGUCGAACAGCACAAGCACUACCUGGA |
| | | CGAAAUCAUCGAACAGAUCAGCGAAUUCAGCAAGAGAGUCAUCCUGGCAGACGCAAACCUGGACAAGGU |
| | | CCUGAGCGCAUACAACAAGCACAGAGACAAGCCGAUCAGAGAACAGGCAGAAAACAUCAUCCACCUGUU |
| | | CACACUGACAAACCUGGGAGCACCGGCAGCAUUCAAGUACUUCGACACAACAAUCGACAGAAAGAGAUA |
| | | CACAAGCACAAAGGAAGUCCUGGACGCAACACUGAUCCACCAGAGCAUCACAGGACUGUACGAAACAAG |
| | | AAUCGACCUGAGCCAGCUGGGAGGAGACUAG |
| 1116 | dCas9 coding | GACAAGAAGUACAGCAUCGGACUGGCAAUCGGAACAAACAGCGUCGGAUGGGCAGUCAUCACAGACGAA |
| | sequence, | UACAAGGUCCCGAGCAAGAAGUUCAAGGUCCUGGGAAACACAGACAGACACAGCAUCAAGAAGAACCUG |
| | without start | AUCGGAGCACUGCUGUUCGACAGCGGAGAAACAGCAGAAGCAACAAGACUGAAGAGAACAGCAAGAAGA |
| | or stop codons | AGAUACACAAGAAGAAAGAACAGAAUCUGCUACCUGCAGGAAAUCUUCAGCAACGAAAUGGCAAAGGUC |
| | | GACGACAGCUUCUUCCACAGACUGGAAGAAAGCUUCCUGGUCGAAGAAGACAAGAAGCACGAAAGACAC |
| | | CCGAUCUUCGGAAACAUCGUCGACGAAGUCGCAUACCACGAAAAGUACCCGACAAUCUACCACCUGAGAA |
| | | AGAAGCUGGUCGACAGCACAGACAAGGCAGACCUGAGACUGAUCUACCUGGCACUGGCACACAUGAUCA |
| | | AGUUCAGAGGACACUUCCUGAUCGAAGGAGACCUGAACCCGGACAACAGCGACGUCGACAAGCUGUUCA |
| | | UCCAGCUGGUCCAGACAUACAACCAGCUGUUCGAAGAAAACCCGAUCAACGCAAGCGGAGUCGACGCAA |
| | | AGGCAAUCCUGAGCGCAAGACUGAGCAAGAGCAGAAGACUGGAAAACCUGAUCGCACAGCUGCCGGGAG |
| | | AAAAGAAGAACGGACUGUUCGGAAACCUGAUCGCACUGAGCCUGGGACUGACACCGAACUUCAAGAGCA |
| | | ACUUCGACCUGGCAGAAGACGCAAAGCUGCAGCUGAGCAAGGACACAUACGACGACGACCUGGACAACC |
| | | UGCUGGCACAGAUCGGAGACCAGUACGCAGACCUGUUCCUGGCAGCAAAGAACCUGAGCGACGCAAUCC |
| | | UGCUGAGCGACAUCCUGAGAGUCAACACAGAAAUCACAAAGGCACCGCUGAGCGCAAGCAUGAUCAAGA |
| | | GAUACGACGAACACCACCAGGACCUGACACUGCUGAAGGCACUGGUCAGACAGCAGCUGCCGGAAAAGU |
| | | ACAAGGAAAUCUUCUUCGACCAGAGCAAGAACGGAUACGCAGGAUACAUCGACGGAGGAGCAAGCCAGG |
| | | AAGAAUUCUACAAGUUCAUCAAGCCGAUCCUGGAAAAGAUGGACGGAACAGAAGAACUGCUGGUCAAGC |
| | | UGAACAGAGAAGACCUGCUGAGAAAGCAGAGAACAUUCGACAACGGAAGCAUCCCGCACCAGAUCCACC |
| | | UGGGAGAACUGCACGCAAUCCUGAGAAGACAGGAAGACUUCUACCCGUUCCUGAAGGACAACAGAGAAA |
| | | AGAUCGAAAAGAUCCUGACAUUCAGAAUCCCGUACUACGUCGGACCGCUGGCAAGAGGAAACAGCAGAU |
| | | UCGCAUGGAUGACAAGAAAGAGCGAAGAAACAAUCACACCGUGGAACUUCGAAGAAGUCGUCGACAAGG |
| | | GAGCAAGCGCACAGAGCUUCAUCGAAAGAAUGACAAACUUCGACAAGAACCUGCCGAACGAAAAGGUCC |
| | | UGCCGAAGCACAGCCUGCUGUACGAAUACUUCACAGUCUACAACGAACUGACAAAGGUCAAGUACGUCA |
| | | CAGAAGGAAUGAGAAAGCCGGCAUUCCUGAGCGGAGAACAGAAGAAGGCAAUCGUCGACCUGCUGUUCA |
| | | AGACAAACAGAAAGGUCACAGUCAAGCAGCUGAAGGAAGACUACUUCAAGAAGAUCGAAUGCUUCGACA |
| | | GCGUCGAAAUCAGCGGAGUCGAAGACAGAUUCAACGCAAGCCUGGGAACAUACCACGACCUGCUGAAGA |
| | | UCAUCAAGGACAAGGACUUCCUGGACAACGAAGAAAACGAAGACAUCCUGGAAGACAUCGUCCUGACAC |
| | | UGACACUGUUCGAAGACAGAGAAAUGAUCGAAGAAAGACUGAAGACAUACGCACACCUGUUCGACGACA |
| | | AGGUCAUGAAGCAGCUGAAGAGAAGAAGAUACACAGGAUGGGGAAGACUGAGCAGAAAGCUGAUCAACG |
| | | GAAUCAGAGACAAGCAGAGCGGAAAGACAAUCCUGGACUUCCUGAAGAGCGACGGAUUCGCAAACAGAA |
| | | ACUUCAUGCAGCUGAUCCACGACGACAGCCUGACAUUCAAGGAAGACAUCCAGAAGGCACAGGUCAGCG |
| | | GACAGGGAGACAGCCUGCACGAACACAUCGCAAACCUGGCAGGAAGCCCGGCAAUCAAGAAGGGAAUCC |
| | | UGCAGACAGUCAAGGUCGUCGACGAACUGGUCAAGGUCAUGGGAAGACACAAGCCGGAAAACAUCGUCA |
| | | UCGAAAUGGCAAGAGAAAACCAGACAACACAGAAGGGACAGAAGAACAGCAGAGAAAGAAUGAAGAGAA |
| | | UCGAAGAAGGAAUCAAGGAACUGGGAAGCCAGAUCCUGAAGGAACACCCGGUCGAAAACACACAGCUGC |
| | | AGAACGAAAAGCUGUACCUGUACUACCUGCAGAACGGAAGAGACAUGUACGUCGACCAGGAACUGGACA |
| | | UCAACAGACUGAGCGACUACGACGUCGACGCAAUCGUCCCGCAGAGCUUCCUGAAGGACGACAGCAUCGA |
| | | CAACAAGGUCCUGACAAGAAGCGACAAGAACAGAGGAAAGAGCGACAACGUCCCGAGCGAAGAAGUCGU |
| | | CAAGAAGAUGAAGAACUACUGGAGACAGCUGCUGAACGCAAAGCUGAUCACACAGAGAAAGUUCGACAA |
| | | CCUGACAAAGGCAGAGAGAGGAGGACUGAGCGAACUGGACAAGGCAGGAUUCAUCAAGAGACAGCUGGU |
| | | CGAAACAAGACAGAUCACAAAGCACGUCGCACAGAUCCUGGACAGCAGAAUGAACACAAAGUACGACGA |
| | | AAACGACAAGCUGAUCAGAGAAGUCAAGGUCAUCACACUGAAGAGCAAGCUGGUCAGCGACUUCAGAAA |
| | | GGACUUCCAGUUCUACAAGGUCAGAGAAAUCAACAACUACCACCACGCACACGACGCAUACCUGAACGCA |
| | | GUCGUCGGAACAGCACUGAUCAAGAAGUACCCGAAGCUGGAAAGCGAAUUCGUCUACGGAGACUACAAG |
| | | GUCUACGACGUCAGAAAGAUGAUCGCAAAGAGCGAACAGGAAAUCGGAAAGGCAACAGCAAAGUACUUC |
| | | UUCUACAGCAACAUCAUGAACUUCUUCAAGACAGAAAUCACACUGGCAAACGGAGAAAUCAGAAAGAGA |
| | | CCGCUGAUCGAAACAAACGGAGAAACAGGAGAAAUCGUCUGGGACAAGGGAAGAGACUUCGCAACAGUC |
| | | AGAAAGGUCCUGAGCAUGCCGCAGGUCAACAUCGUCAAGAAGACAGAAGUCCAGACAGGAGGAUUCAGC |
| | | AAGGAAAGCAUCCUGCCGAAGAGAAACAGCGACAAGCUGAUCGCAAGAAAGAAGGACUGGGACCCGAAG |
| | | AAGUACGGAGGAUUCGACAGCCCGACAGUCGCAUACAGCGUCCUGGUCGUCGCAAAGGUCGAAAAGGGA |
| | | AAGAGCAAGAAGCUGAAGAGCGUCAAGGAACUGCUGGGAAUCACAAUCAUGGAAAGAAGCAGCUUCGAA |
| | | AAGAACCCGAUCGACUUCCUGGAAGCAAAGGGAUACAAGGAAGUCAAGAAGGACCUGAUCAUCAAGCUG |
| | | CCGAAGUACAGCCUGUUCGAACUGGAAAACGGAAGAAAGAGAAUGCUGGCAAGCGCAGGAGAACUGCAG |
| | | AAGGGAAACGAACUGGCACUGCCGAGCAAGUACGUCAACUUCCUGUACCUGGCAAGCCACUACGAAAAG |
| | | CUGAAGGGAAGCCCGGAAGACAACGAACAGAAGCAGCUGUUCGUCGAACAGCACAAGCACUACCUGGAC |
| | | GAAAUCAUCGAACAGAUCAGCGAAUUCAGCAAGAGAGUCAUCCUGGCAGACGCAAACCUGGACAAGGUC |
| | | CUGAGCGCAUACAACAAGCACAGAGACAAGCCGAUCAGAGAACAGGCAGAAAACAUCAUCCACCUGUUC |
| | | ACACUGACAAACCUGGGAGCACCGGCAGCAUUCAAGUACUUCGACACAACAAUCGACAGAAAGAGAUAC |
| | | ACAAGCACAAAGGAAGUCCUGGACGCAACACUGAUCCACCAGAGCAUCACAGGACUGUACGAAACAAGA |
| | | AUCGACCUGAGCCAGCUGGGAGGAGACGGAGGAGGAAGC |
| 1117 | Cas9 mRNA ORF | AUGGACAAGAAGUACAGCAUCGGACUGGACAUCGGAACAAACAGCGUCGGAUGGGCAGUCAUCACAGAC |
| | | GAAUACAAGGUCCCGAGCAAGAAGUUCAAGGUCCUGGGAAACACAGACAGACACAGCAUCAAGAAGAAC |
| | | CUGAUCGGAGCACUGCUGUUCGACAGCGGAGAAACAGCAGAAGCAACAAGACUGAAGAGAACAGCAAGA |
| | | AGAAGAUACACAAGAAGAAAGAACAGAAUCUGCUACCUGCAGGAAAUCUUCAGCAACGAAAUGGCAAAG |
| | | GUCGACGACAGCUUCUUCCACAGACUGGAAGAAAGCUUCCUGGUCGAAGAAGACAAGAAGCACGAAAGA |
| | | CACCCGAUCUUCGGAAACAUCGUCGACGAAGUCGCAUACCACGAAAAGUACCCGACAAUCUACCACCUGA |
| | | GAAAGAAGCUGGUCGACAGCACAGACAAGGCAGACCUGAGACUGAUCUACCUGGCACUGGCACACAUGA |
| | | UCAAGUUCAGAGGACACUUCCUGAUCGAAGGAGACCUGAACCCGGACAACAGCGACGUCGACAAGCUGU |
| | | UCAUCCAGCUGGUCCAGACAUACAACCAGCUGUUCGAAGAAAACCCGAUCAACGCAAGCGGAGUCGACGC |
| | | AAAGGCAAUCCUGAGCGCAAGACUGAGCAAGAGCAGAAGACUGGAAAACCUGAUCGCACAGCUGCCGGG |
| | | AGAAAAGAAGAACGGACUGUUCGGAAACCUGAUCGCACUGAGCCUGGGACUGACACCGAACUUCAAGAG |
| | | CAACUUCGACCUGGCAGAAGACGCAAAGCUGCAGCUGAGCAAGGACACAUACGACGACGACCUGGACAA |
| | | CCUGCUGGCACAGAUCGGAGACCAGUACGCAGACCUGUUCCUGGCAGCAAAGAACCUGAGCGACGCAAUC |
| | | CUGCUGAGCGACAUCCUGAGAGUCAACACAGAAAUCACAAAGGCACCGCUGAGCGCAAGCAUGAUCAAG |
| | | AGAUACGACGAACACCACCAGGACCUGACACUGCUGAAGGCACUGGUCAGACAGCAGCUGCCGGAAAAG |
| | | UACAAGGAAAUCUUCUUCGACCAGAGCAAGAACGGAUACGCAGGAUACAUCGACGGAGGAGCAAGCCAG |
| | | GAAGAAUUCUACAAGUUCAUCAAGCCGAUCCUGGAAAAGAUGGACGGAACAGAAGAACUGCUGGUCAAG |
| | | CUGAACAGAGAAGACCUGCUGAGAAAGCAGAGAACAUUCGACAACGGAAGCAUCCCGCACCAGAUCCAC |
| | | CUGGGAGAACUGCACGCAAUCCUGAGAAGACAGGAAGACUUCUACCCGUUCCUGAAGGACAACAGAGAA |
| | | AAGAUCGAAAAGAUCCUGACAUUCAGAAUCCCGUACUACGUCGGACCGCUGGCAAGAGGAAACAGCAGA |
| | | UUCGCAUGGAUGACAAGAAAGAGCGAAGAAACAAUCACACCGUGGAACUUCGAAGAAGUCGUCGACAAG |
| | | GGAGCAAGCGCACAGAGCUUCAUCGAAAGAAUGACAAACUUCGACAAGAACCUGCCGAACGAAAAGGUC |
| | | CUGCCGAAGCACAGCCUGCUGUACGAAUACUUCACAGUCUACAACGAACUGACAAAGGUCAAGUACGUC |
| | | ACAGAAGGAAUGAGAAAGCCGGCAUUCCUGAGCGGAGAACAGAAGAAGGCAAUCGUCGACCUGCUGUUC |
| | | AAGACAAACAGAAAGGUCACAGUCAAGCAGCUGAAGGAAGACUACUUCAAGAAGAUCGAAUGCUUCGAC |
| | | AGCGUCGAAAUCAGCGGAGUCGAAGACAGAUUCAACGCAAGCCUGGGAACAUACCACGACCUGCUGAAG |
| | | AUCAUCAAGGACAAGGACUUCCUGGACAACGAAGAAAACGAAGACAUCCUGGAAGACAUCGUCCUGACA |
| | | CUGACACUGUUCGAAGACAGAGAAAUGAUCGAAGAAAGACUGAAGACAUACGCACACCUGUUCGACGAC |
| | | AAGGUCAUGAAGCAGCUGAAGAGAAGAAGAUACACAGGAUGGGGAAGACUGAGCAGAAAGCUGAUCAAC |
| | | GGAAUCAGAGACAAGCAGAGCGGAAAGACAAUCCUGGACUUCCUGAAGAGCGACGGAUUCGCAAACAGA |
| | | AACUUCAUGCAGCUGAUCCACGACGACAGCCUGACAUUCAAGGAAGACAUCCAGAAGGCACAGGUCAGC |
| | | GGACAGGGAGACAGCCUGCACGAACACAUCGCAAACCUGGCAGGAAGCCCGGCAAUCAAGAAGGGAAUC |
| | | CUGCAGACAGUCAAGGUCGUCGACGAACUGGUCAAGGUCAUGGGAAGACACAAGCCGGAAAACAUCGUC |
| | | AUCGAAAUGGCAAGAGAAAACCAGACAACACAGAAGGGACAGAAGAACAGCAGAGAAAGAAUGAAGAGA |
| | | AUCGAAGAAGGAAUCAAGGAACUGGGAAGCCAGAUCCUGAAGGAACACCCGGUCGAAAACACACAGCUG |
| | | CAGAACGAAAAGCUGUACCUGUACUACCUGCAGAACGGAAGAGACAUGUACGUCGACCAGGAACUGGAC |
| | | AUCAACAGACUGAGCGACUACGACGUCGACCACAUCGUCCCGCAGAGCUUCCUGAAGGACGACAGCAUCG |
| | | ACAACAAGGUCCUGACAAGAAGCGACAAGAACAGAGGAAAGAGCGACAACGUCCCGAGCGAAGAAGUCG |
| | | UCAAGAAGAUGAAGAACUACUGGAGACAGCUGCUGAACGCAAAGCUGAUCACACAGAGAAAGUUCGACA |
| | | ACCUGACAAAGGCAGAGAGAGGAGGACUGAGCGAACUGGACAAGGCAGGAUUCAUCAAGAGACAGCUGG |
| | | UCGAAACAAGACAGAUCACAAAGCACGUCGCACAGAUCCUGGACAGCAGAAUGAACACAAAGUACGACG |
| | | AAAACGACAAGCUGAUCAGAGAAGUCAAGGUCAUCACACUGAAGAGCAAGCUGGUCAGCGACUUCAGAA |
| | | AGGACUUCCAGUUCUACAAGGUCAGAGAAAUCAACAACUACCACCACGCACACGACGCAUACCUGAACGC |
| | | AGUCGUCGGAACAGCACUGAUCAAGAAGUACCCGAAGCUGGAAAGCGAAUUCGUCUACGGAGACUACAA |
| | | GGUCUACGACGUCAGAAAGAUGAUCGCAAAGAGCGAACAGGAAAUCGGAAAGGCAACAGCAAAGUACUU |
| | | CUUCUACAGCAACAUCAUGAACUUCUUCAAGACAGAAAUCACACUGGCAAACGGAGAAAUCAGAAAGAG |
| | | ACCGCUGAUCGAAACAAACGGAGAAACAGGAGAAAUCGUCUGGGACAAGGGAAGAGACUUCGCAACAGU |
| | | CAGAAAGGUCCUGAGCAUGCCGCAGGUCAACAUCGUCAAGAAGACAGAAGUCCAGACAGGAGGAUUCAG |
| | | CAAGGAAAGCAUCCUGCCGAAGAGAAACAGCGACAAGCUGAUCGCAAGAAAGAAGGACUGGGACCCGAA |
| | | GAAGUACGGAGGAUUCGACAGCCCGACAGUCGCAUACAGCGUCCUGGUCGUCGCAAAGGUCGAAAAGGG |
| | | AAAGAGCAAGAAGCUGAAGAGCGUCAAGGAACUGCUGGGAAUCACAAUCAUGGAAAGAAGCAGCUUCGA |
| | | AAAGAACCCGAUCGACUUCCUGGAAGCAAAGGGAUACAAGGAAGUCAAGAAGGACCUGAUCAUCAAGCU |
| | | GCCGAAGUACAGCCUGUUCGAACUGGAAAACGGAAGAAAGAGAAUGCUGGCAAGCGCAGGAGAACUGCA |
| | | GAAGGGAAACGAACUGGCACUGCCGAGCAAGUACGUCAACUUCCUGUACCUGGCAAGCCACUACGAAAA |
| | | GCUGAAGGGAAGCCCGGAAGACAACGAACAGAAGCAGCUGUUCGUCGAACAGCACAAGCACUACCUGGA |
| | | CGAAAUCAUCGAACAGAUCAGCGAAUUCAGCAAGAGAGUCAUCCUGGCAGACGCAAACCUGGACAAGGU |
| | | CCUGAGCGCAUACAACAAGCACAGAGACAAGCCGAUCAGAGAACAGGCAGAAAACAUCAUCCACCUGUU |
| | | CACACUGACAAACCUGGGAGCACCGGCAGCAUUCAAGUACUUCGACACAACAAUCGACAGAAAGAGAUA |
| | | CACAAGCACAAAGGAAGUCCUGGACGCAACACUGAUCCACCAGAGCAUCACAGGACUGUACGAAACAAG |
| | | AAUCGACCUGAGCCAGCUGGGAGGAGACGGAAGCGGAAGCCCGAAGAAGAAGAGAAAGGUCGACGGAAG |
| | | CCCGAAGAAGAAGAGAAAGGUCGACAGCGGAUAG |
| 1118 | Cas9 coding | GACAAGAAGUACAGCAUCGGACUGGACAUCGGAACAAACAGCGUCGGAUGGGCAGUCAUCACAGACGAA |
| | sequence, | UACAAGGUCCCGAGCAAGAAGUUCAAGGUCCUGGGAAACACAGACAGACACAGCAUCAAGAAGAACCUG |
| | without | AUCGGAGCACUGCUGUUCGACAGCGGAGAAACAGCAGAAGCAACAAGACUGAAGAGAACAGCAAGAAGA |
| | start or stop | AGAUACACAAGAAGAAAGAACAGAAUCUGCUACCUGCAGGAAAUCUUCAGCAACGAAAUGGCAAAGGUC |
| | codons | GACGACAGCUUCUUCCACAGACUGGAAGAAAGCUUCCUGGUCGAAGAAGACAAGAAGCACGAAAGACAC |
| | | CCGAUCUUCGGAAACAUCGUCGACGAAGUCGCAUACCACGAAAAGUACCCGACAAUCUACCACCUGAGAA |
| | | AGAAGCUGGUCGACAGCACAGACAAGGCAGACCUGAGACUGAUCUACCUGGCACUGGCACACAUGAUCA |
| | | AGUUCAGAGGACACUUCCUGAUCGAAGGAGACCUGAACCCGGACAACAGCGACGUCGACAAGCUGUUCA |
| | | UCCAGCUGGUCCAGACAUACAACCAGCUGUUCGAAGAAAACCCGAUCAACGCAAGCGGAGUCGACGCAA |
| | | AGGCAAUCCUGAGCGCAAGACUGAGCAAGAGCAGAAGACUGGAAAACCUGAUCGCACAGCUGCCGGGAG |
| | | AAAAGAAGAACGGACUGUUCGGAAACCUGAUCGCACUGAGCCUGGGACUGACACCGAACUUCAAGAGCA |
| | | ACUUCGACCUGGCAGAAGACGCAAAGCUGCAGCUGAGCAAGGACACAUACGACGACGACCUGGACAACC |
| | | UGCUGGCACAGAUCGGAGACCAGUACGCAGACCUGUUCCUGGCAGCAAAGAACCUGAGCGACGCAAUCC |
| | | UGCUGAGCGACAUCCUGAGAGUCAACACAGAAAUCACAAAGGCACCGCUGAGCGCAAGCAUGAUCAAGA |
| | | GAUACGACGAACACCACCAGGACCUGACACUGCUGAAGGCACUGGUCAGACAGCAGCUGCCGGAAAAGU |
| | | ACAAGGAAAUCUUCUUCGACCAGAGCAAGAACGGAUACGCAGGAUACAUCGACGGAGGAGCAAGCCAGG |
| | | AAGAAUUCUACAAGUUCAUCAAGCCGAUCCUGGAAAAGAUGGACGGAACAGAAGAACUGCUGGUCAAGC |
| | | UGAACAGAGAAGACCUGCUGAGAAAGCAGAGAACAUUCGACAACGGAAGCAUCCCGCACCAGAUCCACC |
| | | UGGGAGAACUGCACGCAAUCCUGAGAAGACAGGAAGACUUCUACCCGUUCCUGAAGGACAACAGAGAAA |
| | | AGAUCGAAAAGAUCCUGACAUUCAGAAUCCCGUACUACGUCGGACCGCUGGCAAGAGGAAACAGCAGAU |
| | | UCGCAUGGAUGACAAGAAAGAGCGAAGAAACAAUCACACCGUGGAACUUCGAAGAAGUCGUCGACAAGG |
| | | GAGCAAGCGCACAGAGCUUCAUCGAAAGAAUGACAAACUUCGACAAGAACCUGCCGAACGAAAAGGUCC |
| | | UGCCGAAGCACAGCCUGCUGUACGAAUACUUCACAGUCUACAACGAACUGACAAAGGUCAAGUACGUCA |
| | | CAGAAGGAAUGAGAAAGCCGGCAUUCCUGAGCGGAGAACAGAAGAAGGCAAUCGUCGACCUGCUGUUCA |
| | | AGACAAACAGAAAGGUCACAGUCAAGCAGCUGAAGGAAGACUACUUCAAGAAGAUCGAAUGCUUCGACA |
| | | GCGUCGAAAUCAGCGGAGUCGAAGACAGAUUCAACGCAAGCCUGGGAACAUACCACGACCUGCUGAAGA |
| | | UCAUCAAGGACAAGGACUUCCUGGACAACGAAGAAAACGAAGACAUCCUGGAAGACAUCGUCCUGACAC |
| | | UGACACUGUUCGAAGACAGAGAAAUGAUCGAAGAAAGACUGAAGACAUACGCACACCUGUUCGACGACA |
| | | AGGUCAUGAAGCAGCUGAAGAGAAGAAGAUACACAGGAUGGGGAAGACUGAGCAGAAAGCUGAUCAACG |
| | | GAAUCAGAGACAAGCAGAGCGGAAAGACAAUCCUGGACUUCCUGAAGAGCGACGGAUUCGCAAACAGAA |
| | | ACUUCAUGCAGCUGAUCCACGACGACAGCCUGACAUUCAAGGAAGACAUCCAGAAGGCACAGGUCAGCG |
| | | GACAGGGAGACAGCCUGCACGAACACAUCGCAAACCUGGCAGGAAGCCCGGCAAUCAAGAAGGGAAUCC |
| | | UGCAGACAGUCAAGGUCGUCGACGAACUGGUCAAGGUCAUGGGAAGACACAAGCCGGAAAACAUCGUCA |
| | | UCGAAAUGGCAAGAGAAAACCAGACAACACAGAAGGGACAGAAGAACAGCAGAGAAAGAAUGAAGAGAA |
| | | UCGAAGAAGGAAUCAAGGAACUGGGAAGCCAGAUCCUGAAGGAACACCCGGUCGAAAACACACAGCUGC |
| | | AGAACGAAAAGCUGUACCUGUACUACCUGCAGAACGGAAGAGACAUGUACGUCGACCAGGAACUGGACA |
| | | UCAACAGACUGAGCGACUACGACGUCGACCACAUCGUCCCGCAGAGCUUCCUGAAGGACGACAGCAUCGA |
| | | CAACAAGGUCCUGACAAGAAGCGACAAGAACAGAGGAAAGAGCGACAACGUCCCGAGCGAAGAAGUCGU |
| | | CAAGAAGAUGAAGAACUACUGGAGACAGCUGCUGAACGCAAAGCUGAUCACACAGAGAAAGUUCGACAA |
| | | CCUGACAAAGGCAGAGAGAGGAGGACUGAGCGAACUGGACAAGGCAGGAUUCAUCAAGAGACAGCUGGU |
| | | CGAAACAAGACAGAUCACAAAGCACGUCGCACAGAUCCUGGACAGCAGAAUGAACACAAAGUACGACGA |
| | | AAACGACAAGCUGAUCAGAGAAGUCAAGGUCAUCACACUGAAGAGCAAGCUGGUCAGCGACUUCAGAAA |
| | | GGACUUCCAGUUCUACAAGGUCAGAGAAAUCAACAACUACCACCACGCACACGACGCAUACCUGAACGCA |
| | | GUCGUCGGAACAGCACUGAUCAAGAAGUACCCGAAGCUGGAAAGCGAAUUCGUCUACGGAGACUACAAG |
| | | GUCUACGACGUCAGAAAGAUGAUCGCAAAGAGCGAACAGGAAAUCGGAAAGGCAACAGCAAAGUACUUC |
| | | UUCUACAGCAACAUCAUGAACUUCUUCAAGACAGAAAUCACACUGGCAAACGGAGAAAUCAGAAAGAGA |
| | | CCGCUGAUCGAAACAAACGGAGAAACAGGAGAAAUCGUCUGGGACAAGGGAAGAGACUUCGCAACAGUC |
| | | AGAAAGGUCCUGAGCAUGCCGCAGGUCAACAUCGUCAAGAAGACAGAAGUCCAGACAGGAGGAUUCAGC |
| | | AAGGAAAGCAUCCUGCCGAAGAGAAACAGCGACAAGCUGAUCGCAAGAAAGAAGGACUGGGACCCGAAG |
| | | AAGUACGGAGGAUUCGACAGCCCGACAGUCGCAUACAGCGUCCUGGUCGUCGCAAAGGUCGAAAAGGGA |
| | | AAGAGCAAGAAGCUGAAGAGCGUCAAGGAACUGCUGGGAAUCACAAUCAUGGAAAGAAGCAGCUUCGAA |
| | | AAGAACCCGAUCGACUUCCUGGAAGCAAAGGGAUACAAGGAAGUCAAGAAGGACCUGAUCAUCAAGCUG |
| | | CCGAAGUACAGCCUGUUCGAACUGGAAAACGGAAGAAAGAGAAUGCUGGCAAGCGCAGGAGAACUGCAG |
| | | AAGGGAAACGAACUGGCACUGCCGAGCAAGUACGUCAACUUCCUGUACCUGGCAAGCCACUACGAAAAG |
| | | CUGAAGGGAAGCCCGGAAGACAACGAACAGAAGCAGCUGUUCGUCGAACAGCACAAGCACUACCUGGAC |
| | | GAAAUCAUCGAACAGAUCAGCGAAUUCAGCAAGAGAGUCAUCCUGGCAGACGCAAACCUGGACAAGGUC |
| | | CUGAGCGCAUACAACAAGCACAGAGACAAGCCGAUCAGAGAACAGGCAGAAAACAUCAUCCACCUGUUC |
| | | ACACUGACAAACCUGGGAGCACCGGCAGCAUUCAAGUACUUCGACACAACAAUCGACAGAAAGAGAUAC |
| | | ACAAGCACAAAGGAAGUCCUGGACGCAACACUGAUCCACCAGAGCAUCACAGGACUGUACGAAACAAGA |
| | | AUCGACCUGAGCCAGCUGGGAGGAGACGGAAGCGGAAGCCCGAAGAAGAAGAGAAAGGUCGACGGAAGC |
| | | CCGAAGAAGAAGAGAAAGGUCGACAGCGGA |
| 1119 | Cas9 nickase | AUGGACAAGAAGUACAGCAUCGGACUGGCAAUCGGAACAAACAGCGUCGGAUGGGCAGUCAUCACAGAC |
| | mRNA ORF | GAAUACAAGGUCCCGAGCAAGAAGUUCAAGGUCCUGGGAAACACAGACAGACACAGCAUCAAGAAGAAC |
| | | CUGAUCGGAGCACUGCUGUUCGACAGCGGAGAAACAGCAGAAGCAACAAGACUGAAGAGAACAGCAAGA |
| | | AGAAGAUACACAAGAAGAAAGAACAGAAUCUGCUACCUGCAGGAAAUCUUCAGCAACGAAAUGGCAAAG |
| | | GUCGACGACAGCUUCUUCCACAGACUGGAAGAAAGCUUCCUGGUCGAAGAAGACAAGAAGCACGAAAGA |
| | | CACCCGAUCUUCGGAAACAUCGUCGACGAAGUCGCAUACCACGAAAAGUACCCGACAAUCUACCACCUGA |
| | | GAAAGAAGCUGGUCGACAGCACAGACAAGGCAGACCUGAGACUGAUCUACCUGGCACUGGCACACAUGA |
| | | UCAAGUUCAGAGGACACUUCCUGAUCGAAGGAGACCUGAACCCGGACAACAGCGACGUCGACAAGCUGU |
| | | UCAUCCAGCUGGUCCAGACAUACAACCAGCUGUUCGAAGAAAACCCGAUCAACGCAAGCGGAGUCGACGC |
| | | AAAGGCAAUCCUGAGCGCAAGACUGAGCAAGAGCAGAAGACUGGAAAACCUGAUCGCACAGCUGCCGGG |
| | | AGAAAAGAAGAACGGACUGUUCGGAAACCUGAUCGCACUGAGCCUGGGACUGACACCGAACUUCAAGAG |
| | | CAACUUCGACCUGGCAGAAGACGCAAAGCUGCAGCUGAGCAAGGACACAUACGACGACGACCUGGACAA |
| | | CCUGCUGGCACAGAUCGGAGACCAGUACGCAGACCUGUUCCUGGCAGCAAAGAACCUGAGCGACGCAAUC |
| | | CUGCUGAGCGACAUCCUGAGAGUCAACACAGAAAUCACAAAGGCACCGCUGAGCGCAAGCAUGAUCAAG |
| | | AGAUACGACGAACACCACCAGGACCUGACACUGCUGAAGGCACUGGUCAGACAGCAGCUGCCGGAAAAG |
| | | UACAAGGAAAUCUUCUUCGACCAGAGCAAGAACGGAUACGCAGGAUACAUCGACGGAGGAGCAAGCCAG |
| | | GAAGAAUUCUACAAGUUCAUCAAGCCGAUCCUGGAAAAGAUGGACGGAACAGAAGAACUGCUGGUCAAG |
| | | CUGAACAGAGAAGACCUGCUGAGAAAGCAGAGAACAUUCGACAACGGAAGCAUCCCGCACCAGAUCCAC |
| | | CUGGGAGAACUGCACGCAAUCCUGAGAAGACAGGAAGACUUCUACCCGUUCCUGAAGGACAACAGAGAA |
| | | AAGAUCGAAAAGAUCCUGACAUUCAGAAUCCCGUACUACGUCGGACCGCUGGCAAGAGGAAACAGCAGA |
| | | UUCGCAUGGAUGACAAGAAAGAGCGAAGAAACAAUCACACCGUGGAACUUCGAAGAAGUCGUCGACAAG |
| | | GGAGCAAGCGCACAGAGCUUCAUCGAAAGAAUGACAAACUUCGACAAGAACCUGCCGAACGAAAAGGUC |
| | | CUGCCGAAGCACAGCCUGCUGUACGAAUACUUCACAGUCUACAACGAACUGACAAAGGUCAAGUACGUC |
| | | ACAGAAGGAAUGAGAAAGCCGGCAUUCCUGAGCGGAGAACAGAAGAAGGCAAUCGUCGACCUGCUGUUC |
| | | AAGACAAACAGAAAGGUCACAGUCAAGCAGCUGAAGGAAGACUACUUCAAGAAGAUCGAAUGCUUCGAC |
| | | AGCGUCGAAAUCAGCGGAGUCGAAGACAGAUUCAACGCAAGCCUGGGAACAUACCACGACCUGCUGAAG |
| | | AUCAUCAAGGACAAGGACUUCCUGGACAACGAAGAAAACGAAGACAUCCUGGAAGACAUCGUCCUGACA |
| | | CUGACACUGUUCGAAGACAGAGAAAUGAUCGAAGAAAGACUGAAGACAUACGCACACCUGUUCGACGAC |
| | | AAGGUCAUGAAGCAGCUGAAGAGAAGAAGAUACACAGGAUGGGGAAGACUGAGCAGAAAGCUGAUCAAC |
| | | GGAAUCAGAGACAAGCAGAGCGGAAAGACAAUCCUGGACUUCCUGAAGAGCGACGGAUUCGCAAACAGA |
| | | AACUUCAUGCAGCUGAUCCACGACGACAGCCUGACAUUCAAGGAAGACAUCCAGAAGGCACAGGUCAGC |
| | | GGACAGGGAGACAGCCUGCACGAACACAUCGCAAACCUGGCAGGAAGCCCGGCAAUCAAGAAGGGAAUC |
| | | CUGCAGACAGUCAAGGUCGUCGACGAACUGGUCAAGGUCAUGGGAAGACACAAGCCGGAAAACAUCGUC |
| | | AUCGAAAUGGCAAGAGAAAACCAGACAACACAGAAGGGACAGAAGAACAGCAGAGAAAGAAUGAAGAGA |
| | | AUCGAAGAAGGAAUCAAGGAACUGGGAAGCCAGAUCCUGAAGGAACACCCGGUCGAAAACACACAGCUG |
| | | CAGAACGAAAAGCUGUACCUGUACUACCUGCAGAACGGAAGAGACAUGUACGUCGACCAGGAACUGGAC |
| | | AUCAACAGACUGAGCGACUACGACGUCGACCACAUCGUCCCGCAGAGCUUCCUGAAGGACGACAGCAUCG |
| | | ACAACAAGGUCCUGACAAGAAGCGACAAGAACAGAGGAAAGAGCGACAACGUCCCGAGCGAAGAAGUCG |
| | | UCAAGAAGAUGAAGAACUACUGGAGACAGCUGCUGAACGCAAAGCUGAUCACACAGAGAAAGUUCGACA |
| | | ACCUGACAAAGGCAGAGAGAGGAGGACUGAGCGAACUGGACAAGGCAGGAUUCAUCAAGAGACAGCUGG |
| | | UCGAAACAAGACAGAUCACAAAGCACGUCGCACAGAUCCUGGACAGCAGAAUGAACACAAAGUACGACG |
| | | AAAACGACAAGCUGAUCAGAGAAGUCAAGGUCAUCACACUGAAGAGCAAGCUGGUCAGCGACUUCAGAA |
| | | AGGACUUCCAGUUCUACAAGGUCAGAGAAAUCAACAACUACCACCACGCACACGACGCAUACCUGAACGC |
| | | AGUCGUCGGAACAGCACUGAUCAAGAAGUACCCGAAGCUGGAAAGCGAAUUCGUCUACGGAGACUACAA |
| | | GGUCUACGACGUCAGAAAGAUGAUCGCAAAGAGCGAACAGGAAAUCGGAAAGGCAACAGCAAAGUACUU |
| | | CUUCUACAGCAACAUCAUGAACUUCUUCAAGACAGAAAUCACACUGGCAAACGGAGAAAUCAGAAAGAG |
| | | ACCGCUGAUCGAAACAAACGGAGAAACAGGAGAAAUCGUCUGGGACAAGGGAAGAGACUUCGCAACAGU |
| | | CAGAAAGGUCCUGAGCAUGCCGCAGGUCAACAUCGUCAAGAAGACAGAAGUCCAGACAGGAGGAUUCAG |
| | | CAAGGAAAGCAUCCUGCCGAAGAGAAACAGCGACAAGCUGAUCGCAAGAAAGAAGGACUGGGACCCGAA |
| | | GAAGUACGGAGGAUUCGACAGCCCGACAGUCGCAUACAGCGUCCUGGUCGUCGCAAAGGUCGAAAAGGG |
| | | AAAGAGCAAGAAGCUGAAGAGCGUCAAGGAACUGCUGGGAAUCACAAUCAUGGAAAGAAGCAGCUUCGA |
| | | AAAGAACCCGAUCGACUUCCUGGAAGCAAAGGGAUACAAGGAAGUCAAGAAGGACCUGAUCAUCAAGCU |
| | | GCCGAAGUACAGCCUGUUCGAACUGGAAAACGGAAGAAAGAGAAUGCUGGCAAGCGCAGGAGAACUGCA |
| | | GAAGGGAAACGAACUGGCACUGCCGAGCAAGUACGUCAACUUCCUGUACCUGGCAAGCCACUACGAAAA |
| | | GCUGAAGGGAAGCCCGGAAGACAACGAACAGAAGCAGCUGUUCGUCGAACAGCACAAGCACUACCUGGA |
| | | CGAAAUCAUCGAACAGAUCAGCGAAUUCAGCAAGAGAGUCAUCCUGGCAGACGCAAACCUGGACAAGGU |
| | | CCUGAGCGCAUACAACAAGCACAGAGACAAGCCGAUCAGAGAACAGGCAGAAAACAUCAUCCACCUGUU |
| | | CACACUGACAAACCUGGGAGCACCGGCAGCAUUCAAGUACUUCGACACAACAAUCGACAGAAAGAGAUA |
| | | CACAAGCACAAAGGAAGUCCUGGACGCAACACUGAUCCACCAGAGCAUCACAGGACUGUACGAAACAAG |
| | | AAUCGACCUGAGCCAGCUGGGAGGAGACGGAAGCGGAAGCCCGAAGAAGAAGAGAAAGGUCGACGGAAG |
| | | CCCGAAGAAGAAGAGAAAGGUCGACAGCGGAUAG |
| 1120 | Cas9 nickase | GACAAGAAGUACAGCAUCGGACUGGCAAUCGGAACAAACAGCGUCGGAUGGGCAGUCAUCACAGACGAA |
| | coding sequence, | UACAAGGUCCCGAGCAAGAAGUUCAAGGUCCUGGGAAACACAGACAGACACAGCAUCAAGAAGAACCUG |
| | without start | AUCGGAGCACUGCUGUUCGACAGCGGAGAAACAGCAGAAGCAACAAGACUGAAGAGAACAGCAAGAAGA |
| | or stop codons | AGAUACACAAGAAGAAAGAACAGAAUCUGCUACCUGCAGGAAAUCUUCAGCAACGAAAUGGCAAAGGUC |
| | | GACGACAGCUUCUUCCACAGACUGGAAGAAAGCUUCCUGGUCGAAGAAGACAAGAAGCACGAAAGACAC |
| | | CCGAUCUUCGGAAACAUCGUCGACGAAGUCGCAUACCACGAAAAGUACCCGACAAUCUACCACCUGAGAA |
| | | AGAAGCUGGUCGACAGCACAGACAAGGCAGACCUGAGACUGAUCUACCUGGCACUGGCACACAUGAUCA |
| | | AGUUCAGAGGACACUUCCUGAUCGAAGGAGACCUGAACCCGGACAACAGCGACGUCGACAAGCUGUUCA |
| | | UCCAGCUGGUCCAGACAUACAACCAGCUGUUCGAAGAAAACCCGAUCAACGCAAGCGGAGUCGACGCAA |
| | | AGGCAAUCCUGAGCGCAAGACUGAGCAAGAGCAGAAGACUGGAAAACCUGAUCGCACAGCUGCCGGGAG |
| | | AAAAGAAGAACGGACUGUUCGGAAACCUGAUCGCACUGAGCCUGGGACUGACACCGAACUUCAAGAGCA |
| | | ACUUCGACCUGGCAGAAGACGCAAAGCUGCAGCUGAGCAAGGACACAUACGACGACGACCUGGACAACC |
| | | UGCUGGCACAGAUCGGAGACCAGUACGCAGACCUGUUCCUGGCAGCAAAGAACCUGAGCGACGCAAUCC |
| | | UGCUGAGCGACAUCCUGAGAGUCAACACAGAAAUCACAAAGGCACCGCUGAGCGCAAGCAUGAUCAAGA |
| | | GAUACGACGAACACCACCAGGACCUGACACUGCUGAAGGCACUGGUCAGACAGCAGCUGCCGGAAAAGU |
| | | ACAAGGAAAUCUUCUUCGACCAGAGCAAGAACGGAUACGCAGGAUACAUCGACGGAGGAGCAAGCCAGG |
| | | AAGAAUUCUACAAGUUCAUCAAGCCGAUCCUGGAAAAGAUGGACGGAACAGAAGAACUGCUGGUCAAGC |
| | | UGAACAGAGAAGACCUGCUGAGAAAGCAGAGAACAUUCGACAACGGAAGCAUCCCGCACCAGAUCCACC |
| | | UGGGAGAACUGCACGCAAUCCUGAGAAGACAGGAAGACUUCUACCCGUUCCUGAAGGACAACAGAGAAA |
| | | AGAUCGAAAAGAUCCUGACAUUCAGAAUCCCGUACUACGUCGGACCGCUGGCAAGAGGAAACAGCAGAU |
| | | UCGCAUGGAUGACAAGAAAGAGCGAAGAAACAAUCACACCGUGGAACUUCGAAGAAGUCGUCGACAAGG |
| | | GAGCAAGCGCACAGAGCUUCAUCGAAAGAAUGACAAACUUCGACAAGAACCUGCCGAACGAAAAGGUCC |
| | | UGCCGAAGCACAGCCUGCUGUACGAAUACUUCACAGUCUACAACGAACUGACAAAGGUCAAGUACGUCA |
| | | CAGAAGGAAUGAGAAAGCCGGCAUUCCUGAGCGGAGAACAGAAGAAGGCAAUCGUCGACCUGCUGUUCA |
| | | AGACAAACAGAAAGGUCACAGUCAAGCAGCUGAAGGAAGACUACUUCAAGAAGAUCGAAUGCUUCGACA |
| | | GCGUCGAAAUCAGCGGAGUCGAAGACAGAUUCAACGCAAGCCUGGGAACAUACCACGACCUGCUGAAGA |
| | | UCAUCAAGGACAAGGACUUCCUGGACAACGAAGAAAACGAAGACAUCCUGGAAGACAUCGUCCUGACAC |
| | | UGACACUGUUCGAAGACAGAGAAAUGAUCGAAGAAAGACUGAAGACAUACGCACACCUGUUCGACGACA |
| | | AGGUCAUGAAGCAGCUGAAGAGAAGAAGAUACACAGGAUGGGGAAGACUGAGCAGAAAGCUGAUCAACG |
| | | GAAUCAGAGACAAGCAGAGCGGAAAGACAAUCCUGGACUUCCUGAAGAGCGACGGAUUCGCAAACAGAA |
| | | ACUUCAUGCAGCUGAUCCACGACGACAGCCUGACAUUCAAGGAAGACAUCCAGAAGGCACAGGUCAGCG |
| | | GACAGGGAGACAGCCUGCACGAACACAUCGCAAACCUGGCAGGAAGCCCGGCAAUCAAGAAGGGAAUCC |
| | | UGCAGACAGUCAAGGUCGUCGACGAACUGGUCAAGGUCAUGGGAAGACACAAGCCGGAAAACAUCGUCA |
| | | UCGAAAUGGCAAGAGAAAACCAGACAACACAGAAGGGACAGAAGAACAGCAGAGAAAGAAUGAAGAGAA |
| | | UCGAAGAAGGAAUCAAGGAACUGGGAAGCCAGAUCCUGAAGGAACACCCGGUCGAAAACACACAGCUGC |
| | | AGAACGAAAAGCUGUACCUGUACUACCUGCAGAACGGAAGAGACAUGUACGUCGACCAGGAACUGGACA |
| | | UCAACAGACUGAGCGACUACGACGUCGACCACAUCGUCCCGCAGAGCUUCCUGAAGGACGACAGCAUCGA |
| | | CAACAAGGUCCUGACAAGAAGCGACAAGAACAGAGGAAAGAGCGACAACGUCCCGAGCGAAGAAGUCGU |
| | | CAAGAAGAUGAAGAACUACUGGAGACAGCUGCUGAACGCAAAGCUGAUCACACAGAGAAAGUUCGACAA |
| | | CCUGACAAAGGCAGAGAGAGGAGGACUGAGCGAACUGGACAAGGCAGGAUUCAUCAAGAGACAGCUGGU |
| | | CGAAACAAGACAGAUCACAAAGCACGUCGCACAGAUCCUGGACAGCAGAAUGAACACAAAGUACGACGA |
| | | AAACGACAAGCUGAUCAGAGAAGUCAAGGUCAUCACACUGAAGAGCAAGCUGGUCAGCGACUUCAGAAA |
| | | GGACUUCCAGUUCUACAAGGUCAGAGAAAUCAACAACUACCACCACGCACACGACGCAUACCUGAACGCA |
| | | GUCGUCGGAACAGCACUGAUCAAGAAGUACCCGAAGCUGGAAAGCGAAUUCGUCUACGGAGACUACAAG |
| | | GUCUACGACGUCAGAAAGAUGAUCGCAAAGAGCGAACAGGAAAUCGGAAAGGCAACAGCAAAGUACUUC |
| | | UUCUACAGCAACAUCAUGAACUUCUUCAAGACAGAAAUCACACUGGCAAACGGAGAAAUCAGAAAGAGA |
| | | CCGCUGAUCGAAACAAACGGAGAAACAGGAGAAAUCGUCUGGGACAAGGGAAGAGACUUCGCAACAGUC |
| | | AGAAAGGUCCUGAGCAUGCCGCAGGUCAACAUCGUCAAGAAGACAGAAGUCCAGACAGGAGGAUUCAGC |
| | | AAGGAAAGCAUCCUGCCGAAGAGAAACAGCGACAAGCUGAUCGCAAGAAAGAAGGACUGGGACCCGAAG |
| | | AAGUACGGAGGAUUCGACAGCCCGACAGUCGCAUACAGCGUCCUGGUCGUCGCAAAGGUCGAAAAGGGA |
| | | AAGAGCAAGAAGCUGAAGAGCGUCAAGGAACUGCUGGGAAUCACAAUCAUGGAAAGAAGCAGCUUCGAA |
| | | AAGAACCCGAUCGACUUCCUGGAAGCAAAGGGAUACAAGGAAGUCAAGAAGGACCUGAUCAUCAAGCUG |
| | | CCGAAGUACAGCCUGUUCGAACUGGAAAACGGAAGAAAGAGAAUGCUGGCAAGCGCAGGAGAACUGCAG |
| | | AAGGGAAACGAACUGGCACUGCCGAGCAAGUACGUCAACUUCCUGUACCUGGCAAGCCACUACGAAAAG |
| | | CUGAAGGGAAGCCCGGAAGACAACGAACAGAAGCAGCUGUUCGUCGAACAGCACAAGCACUACCUGGAC |
| | | GAAAUCAUCGAACAGAUCAGCGAAUUCAGCAAGAGAGUCAUCCUGGCAGACGCAAACCUGGACAAGGUC |
| | | CUGAGCGCAUACAACAAGCACAGAGACAAGCCGAUCAGAGAACAGGCAGAAAACAUCAUCCACCUGUUC |
| | | ACACUGACAAACCUGGGAGCACCGGCAGCAUUCAAGUACUUCGACACAACAAUCGACAGAAAGAGAUAC |
| | | ACAAGCACAAAGGAAGUCCUGGACGCAACACUGAUCCACCAGAGCAUCACAGGACUGUACGAAACAAGA |
| | | AUCGACCUGAGCCAGCUGGGAGGAGAC |
| | | GGAAGCGGAAGCCCGAAGAAGAAGAGAAAGGUCGACGGAAGCCCGAAGAAGAAGAGAAAGGUCGACAGC |
| | | GGA |
| 1121 | dCas9 mRNA ORF | AUGGACAAGAAGUACAGCAUCGGACUGGCAAUCGGAACAAACAGCGUCGGAUGGGCAGUCAUCACAGAC |
| | | GAAUACAAGGUCCCGAGCAAGAAGUUCAAGGUCCUGGGAAACACAGACAGACACAGCAUCAAGAAGAAC |
| | | CUGAUCGGAGCACUGCUGUUCGACAGCGGAGAAACAGCAGAAGCAACAAGACUGAAGAGAACAGCAAGA |
| | | AGAAGAUACACAAGAAGAAAGAACAGAAUCUGCUACCUGCAGGAAAUCUUCAGCAACGAAAUGGCAAAG |
| | | GUCGACGACAGCUUCUUCCACAGACUGGAAGAAAGCUUCCUGGUCGAAGAAGACAAGAAGCACGAAAGA |
| | | CACCCGAUCUUCGGAAACAUCGUCGACGAAGUCGCAUACCACGAAAAGUACCCGACAAUCUACCACCUGA |
| | | GAAAGAAGCUGGUCGACAGCACAGACAAGGCAGACCUGAGACUGAUCUACCUGGCACUGGCACACAUGA |
| | | UCAAGUUCAGAGGACACUUCCUGAUCGAAGGAGACCUGAACCCGGACAACAGCGACGUCGACAAGCUGU |
| | | UCAUCCAGCUGGUCCAGACAUACAACCAGCUGUUCGAAGAAAACCCGAUCAACGCAAGCGGAGUCGACGC |
| | | AAAGGCAAUCCUGAGCGCAAGACUGAGCAAGAGCAGAAGACUGGAAAACCUGAUCGCACAGCUGCCGGG |
| | | AGAAAAGAAGAACGGACUGUUCGGAAACCUGAUCGCACUGAGCCUGGGACUGACACCGAACUUCAAGAG |
| | | CAACUUCGACCUGGCAGAAGACGCAAAGCUGCAGCUGAGCAAGGACACAUACGACGACGACCUGGACAA |
| | | CCUGCUGGCACAGAUCGGAGACCAGUACGCAGACCUGUUCCUGGCAGCAAAGAACCUGAGCGACGCAAUC |
| | | CUGCUGAGCGACAUCCUGAGAGUCAACACAGAAAUCACAAAGGCACCGCUGAGCGCAAGCAUGAUCAAG |
| | | AGAUACGACGAACACCACCAGGACCUGACACUGCUGAAGGCACUGGUCAGACAGCAGCUGCCGGAAAAG |
| | | UACAAGGAAAUCUUCUUCGACCAGAGCAAGAACGGAUACGCAGGAUACAUCGACGGAGGAGCAAGCCAG |
| | | GAAGAAUUCUACAAGUUCAUCAAGCCGAUCCUGGAAAAGAUGGACGGAACAGAAGAACUGCUGGUCAAG |
| | | CUGAACAGAGAAGACCUGCUGAGAAAGCAGAGAACAUUCGACAACGGAAGCAUCCCGCACCAGAUCCAC |
| | | CUGGGAGAACUGCACGCAAUCCUGAGAAGACAGGAAGACUUCUACCCGUUCCUGAAGGACAACAGAGAA |
| | | AAGAUCGAAAAGAUCCUGACAUUCAGAAUCCCGUACUACGUCGGACCGCUGGCAAGAGGAAACAGCAGA |
| | | UUCGCAUGGAUGACAAGAAAGAGCGAAGAAACAAUCACACCGUGGAACUUCGAAGAAGUCGUCGACAAG |
| | | GGAGCAAGCGCACAGAGCUUCAUCGAAAGAAUGACAAACUUCGACAAGAACCUGCCGAACGAAAAGGUC |
| | | CUGCCGAAGCACAGCCUGCUGUACGAAUACUUCACAGUCUACAACGAACUGACAAAGGUCAAGUACGUC |
| | | ACAGAAGGAAUGAGAAAGCCGGCAUUCCUGAGCGGAGAACAGAAGAAGGCAAUCGUCGACCUGCUGUUC |
| | | AAGACAAACAGAAAGGUCACAGUCAAGCAGCUGAAGGAAGACUACUUCAAGAAGAUCGAAUGCUUCGAC |
| | | AGCGUCGAAAUCAGCGGAGUCGAAGACAGAUUCAACGCAAGCCUGGGAACAUACCACGACCUGCUGAAG |
| | | AUCAUCAAGGACAAGGACUUCCUGGACAACGAAGAAAACGAAGACAUCCUGGAAGACAUCGUCCUGACA |
| | | CUGACACUGUUCGAAGACAGAGAAAUGAUCGAAGAAAGACUGAAGACAUACGCACACCUGUUCGACGAC |
| | | AAGGUCAUGAAGCAGCUGAAGAGAAGAAGAUACACAGGAUGGGGAAGACUGAGCAGAAAGCUGAUCAAC |
| | | GGAAUCAGAGACAAGCAGAGCGGAAAGACAAUCCUGGACUUCCUGAAGAGCGACGGAUUCGCAAACAGA |
| | | AACUUCAUGCAGCUGAUCCACGACGACAGCCUGACAUUCAAGGAAGACAUCCAGAAGGCACAGGUCAGC |
| | | GGACAGGGAGACAGCCUGCACGAACACAUCGCAAACCUGGCAGGAAGCCCGGCAAUCAAGAAGGGAAUC |
| | | CUGCAGACAGUCAAGGUCGUCGACGAACUGGUCAAGGUCAUGGGAAGACACAAGCCGGAAAACAUCGUC |
| | | AUCGAAAUGGCAAGAGAAAACCAGACAACACAGAAGGGACAGAAGAACAGCAGAGAAAGAAUGAAGAGA |
| | | AUCGAAGAAGGAAUCAAGGAACUGGGAAGCCAGAUCCUGAAGGAACACCCGGUCGAAAACACACAGCUG |
| | | CAGAACGAAAAGCUGUACCUGUACUACCUGCAGAACGGAAGAGACAUGUACGUCGACCAGGAACUGGAC |
| | | AUCAACAGACUGAGCGACUACGACGUCGACGCAAUCGUCCCGCAGAGCUUCCUGAAGGACGACAGCAUCG |
| | | ACAACAAGGUCCUGACAAGAAGCGACAAGAACAGAGGAAAGAGCGACAACGUCCCGAGCGAAGAAGUCG |
| | | UCAAGAAGAUGAAGAACUACUGGAGACAGCUGCUGAACGCAAAGCUGAUCACACAGAGAAAGUUCGACA |
| | | ACCUGACAAAGGCAGAGAGAGGAGGACUGAGCGAACUGGACAAGGCAGGAUUCAUCAAGAGACAGCUGG |
| | | UCGAAACAAGACAGAUCACAAAGCACGUCGCACAGAUCCUGGACAGCAGAAUGAACACAAAGUACGACG |
| | | AAAACGACAAGCUGAUCAGAGAAGUCAAGGUCAUCACACUGAAGAGCAAGCUGGUCAGCGACUUCAGAA |
| | | AGGACUUCCAGUUCUACAAGGUCAGAGAAAUCAACAACUACCACCACGCACACGACGCAUACCUGAACGC |
| | | AGUCGUCGGAACAGCACUGAUCAAGAAGUACCCGAAGCUGGAAAGCGAAUUCGUCUACGGAGACUACAA |
| | | GGUCUACGACGUCAGAAAGAUGAUCGCAAAGAGCGAACAGGAAAUCGGAAAGGCAACAGCAAAGUACUU |
| | | CUUCUACAGCAACAUCAUGAACUUCUUCAAGACAGAAAUCACACUGGCAAACGGAGAAAUCAGAAAGAG |
| | | ACCGCUGAUCGAAACAAACGGAGAAACAGGAGAAAUCGUCUGGGACAAGGGAAGAGACUUCGCAACAGU |
| | | CAGAAAGGUCCUGAGCAUGCCGCAGGUCAACAUCGUCAAGAAGACAGAAGUCCAGACAGGAGGAUUCAG |
| | | CAAGGAAAGCAUCCUGCCGAAGAGAAACAGCGACAAGCUGAUCGCAAGAAAGAAGGACUGGGACCCGAA |
| | | GAAGUACGGAGGAUUCGACAGCCCGACAGUCGCAUACAGCGUCCUGGUCGUCGCAAAGGUCGAAAAGGG |
| | | AAAGAGCAAGAAGCUGAAGAGCGUCAAGGAACUGCUGGGAAUCACAAUCAUGGAAAGAAGCAGCUUCGA |
| | | AAAGAACCCGAUCGACUUCCUGGAAGCAAAGGGAUACAAGGAAGUCAAGAAGGACCUGAUCAUCAAGCU |
| | | GCCGAAGUACAGCCUGUUCGAACUGGAAAACGGAAGAAAGAGAAUGCUGGCAAGCGCAGGAGAACUGCA |
| | | GAAGGGAAACGAACUGGCACUGCCGAGCAAGUACGUCAACUUCCUGUACCUGGCAAGCCACUACGAAAA |
| | | GCUGAAGGGAAGCCCGGAAGACAACGAACAGAAGCAGCUGUUCGUCGAACAGCACAAGCACUACCUGGA |
| | | CGAAAUCAUCGAACAGAUCAGCGAAUUCAGCAAGAGAGUCAUCCUGGCAGACGCAAACCUGGACAAGGU |
| | | CCUGAGCGCAUACAACAAGCACAGAGACAAGCCGAUCAGAGAACAGGCAGAAAACAUCAUCCACCUGUU |
| | | CACACUGACAAACCUGGGAGCACCGGCAGCAUUCAAGUACUUCGACACAACAAUCGACAGAAAGAGAUA |
| | | CACAAGCACAAAGGAAGUCCUGGACGCAACACUGAUCCACCAGAGCAUCACAGGACUGUACGAAACAAG |
| | | AAUCGACCUGAGCCAGCUGGGAGGAGAC |
| | | GGAAGCGGAAGCCCGAAGAAGAAGAGAAAGGUCGACGGAAGCCCGAAGAAGAAGAGAAAGGUCGACAGC |
| | | GGAUAG |
| 1122 | dCas9 coding | GACAAGAAGUACAGCAUCGGACUGGCAAUCGGAACAAACAGCGUCGGAUGGGCAGUCAUCACAGACGAA |
| | sequence, | UACAAGGUCCCGAGCAAGAAGUUCAAGGUCCUGGGAAACACAGACAGACACAGCAUCAAGAAGAACCUG |
| | without start | AUCGGAGCACUGCUGUUCGACAGCGGAGAAACAGCAGAAGCAACAAGACUGAAGAGAACAGCAAGAAGA |
| | or stop codons | AGAUACACAAGAAGAAAGAACAGAAUCUGCUACCUGCAGGAAAUCUUCAGCAACGAAAUGGCAAAGGUC |
| | | GACGACAGCUUCUUCCACAGACUGGAAGAAAGCUUCCUGGUCGAAGAAGACAAGAAGCACGAAAGACAC |
| | | CCGAUCUUCGGAAACAUCGUCGACGAAGUCGCAUACCACGAAAAGUACCCGACAAUCUACCACCUGAGAA |
| | | AGAAGCUGGUCGACAGCACAGACAAGGCAGACCUGAGACUGAUCUACCUGGCACUGGCACACAUGAUCA |
| | | AGUUCAGAGGACACUUCCUGAUCGAAGGAGACCUGAACCCGGACAACAGCGACGUCGACAAGCUGUUCA |
| | | UCCAGCUGGUCCAGACAUACAACCAGCUGUUCGAAGAAAACCCGAUCAACGCAAGCGGAGUCGACGCAA |
| | | AGGCAAUCCUGAGCGCAAGACUGAGCAAGAGCAGAAGACUGGAAAACCUGAUCGCACAGCUGCCGGGAG |
| | | AAAAGAAGAACGGACUGUUCGGAAACCUGAUCGCACUGAGCCUGGGACUGACACCGAACUUCAAGAGCA |
| | | ACUUCGACCUGGCAGAAGACGCAAAGCUGCAGCUGAGCAAGGACACAUACGACGACGACCUGGACAACC |
| | | UGCUGGCACAGAUCGGAGACCAGUACGCAGACCUGUUCCUGGCAGCAAAGAACCUGAGCGACGCAAUCC |
| | | UGCUGAGCGACAUCCUGAGAGUCAACACAGAAAUCACAAAGGCACCGCUGAGCGCAAGCAUGAUCAAGA |
| | | GAUACGACGAACACCACCAGGACCUGACACUGCUGAAGGCACUGGUCAGACAGCAGCUGCCGGAAAAGU |
| | | ACAAGGAAAUCUUCUUCGACCAGAGCAAGAACGGAUACGCAGGAUACAUCGACGGAGGAGCAAGCCAGG |
| | | AAGAAUUCUACAAGUUCAUCAAGCCGAUCCUGGAAAAGAUGGACGGAACAGAAGAACUGCUGGUCAAGC |
| | | UGAACAGAGAAGACCUGCUGAGAAAGCAGAGAACAUUCGACAACGGAAGCAUCCCGCACCAGAUCCACC |
| | | UGGGAGAACUGCACGCAAUCCUGAGAAGACAGGAAGACUUCUACCCGUUCCUGAAGGACAACAGAGAAA |
| | | AGAUCGAAAAGAUCCUGACAUUCAGAAUCCCGUACUACGUCGGACCGCUGGCAAGAGGAAACAGCAGAU |
| | | UCGCAUGGAUGACAAGAAAGAGCGAAGAAACAAUCACACCGUGGAACUUCGAAGAAGUCGUCGACAAGG |
| | | GAGCAAGCGCACAGAGCUUCAUCGAAAGAAUGACAAACUUCGACAAGAACCUGCCGAACGAAAAGGUCC |
| | | UGCCGAAGCACAGCCUGCUGUACGAAUACUUCACAGUCUACAACGAACUGACAAAGGUCAAGUACGUCA |
| | | CAGAAGGAAUGAGAAAGCCGGCAUUCCUGAGCGGAGAACAGAAGAAGGCAAUCGUCGACCUGCUGUUCA |
| | | AGACAAACAGAAAGGUCACAGUCAAGCAGCUGAAGGAAGACUACUUCAAGAAGAUCGAAUGCUUCGACA |
| | | GCGUCGAAAUCAGCGGAGUCGAAGACAGAUUCAACGCAAGCCUGGGAACAUACCACGACCUGCUGAAGA |
| | | UCAUCAAGGACAAGGACUUCCUGGACAACGAAGAAAACGAAGACAUCCUGGAAGACAUCGUCCUGACAC |
| | | UGACACUGUUCGAAGACAGAGAAAUGAUCGAAGAAAGACUGAAGACAUACGCACACCUGUUCGACGACA |
| | | AGGUCAUGAAGCAGCUGAAGAGAAGAAGAUACACAGGAUGGGGAAGACUGAGCAGAAAGCUGAUCAACG |
| | | GAAUCAGAGACAAGCAGAGCGGAAAGACAAUCCUGGACUUCCUGAAGAGCGACGGAUUCGCAAACAGAA |
| | | ACUUCAUGCAGCUGAUCCACGACGACAGCCUGACAUUCAAGGAAGACAUCCAGAAGGCACAGGUCAGCG |
| | | GACAGGGAGACAGCCUGCACGAACACAUCGCAAACCUGGCAGGAAGCCCGGCAAUCAAGAAGGGAAUCC |
| | | UGCAGACAGUCAAGGUCGUCGACGAACUGGUCAAGGUCAUGGGAAGACACAAGCCGGAAAACAUCGUCA |
| | | UCGAAAUGGCAAGAGAAAACCAGACAACACAGAAGGGACAGAAGAACAGCAGAGAAAGAAUGAAGAGAA |
| | | UCGAAGAAGGAAUCAAGGAACUGGGAAGCCAGAUCCUGAAGGAACACCCGGUCGAAAACACACAGCUGC |
| | | AGAACGAAAAGCUGUACCUGUACUACCUGCAGAACGGAAGAGACAUGUACGUCGACCAGGAACUGGACA |
| | | UCAACAGACUGAGCGACUACGACGUCGACGCAAUCGUCCCGCAGAGCUUCCUGAAGGACGACAGCAUCGA |
| | | CAACAAGGUCCUGACAAGAAGCGACAAGAACAGAGGAAAGAGCGACAACGUCCCGAGCGAAGAAGUCGU |
| | | CAAGAAGAUGAAGAACUACUGGAGACAGCUGCUGAACGCAAAGCUGAUCACACAGAGAAAGUUCGACAA |
| | | CCUGACAAAGGCAGAGAGAGGAGGACUGAGCGAACUGGACAAGGCAGGAUUCAUCAAGAGACAGCUGGU |
| | | CGAAACAAGACAGAUCACAAAGCACGUCGCACAGAUCCUGGACAGCAGAAUGAACACAAAGUACGACGA |
| | | AAACGACAAGCUGAUCAGAGAAGUCAAGGUCAUCACACUGAAGAGCAAGCUGGUCAGCGACUUCAGAAA |
| | | GGACUUCCAGUUCUACAAGGUCAGAGAAAUCAACAACUACCACCACGCACACGACGCAUACCUGAACGCA |
| | | GUCGUCGGAACAGCACUGAUCAAGAAGUACCCGAAGCUGGAAAGCGAAUUCGUCUACGGAGACUACAAG |
| | | GUCUACGACGUCAGAAAGAUGAUCGCAAAGAGCGAACAGGAAAUCGGAAAGGCAACAGCAAAGUACUUC |
| | | UUCUACAGCAACAUCAUGAACUUCUUCAAGACAGAAAUCACACUGGCAAACGGAGAAAUCAGAAAGAGA |
| | | CCGCUGAUCGAAACAAACGGAGAAACAGGAGAAAUCGUCUGGGACAAGGGAAGAGACUUCGCAACAGUC |
| | | AGAAAGGUCCUGAGCAUGCCGCAGGUCAACAUCGUCAAGAAGACAGAAGUCCAGACAGGAGGAUUCAGC |
| | | AAGGAAAGCAUCCUGCCGAAGAGAAACAGCGACAAGCUGAUCGCAAGAAAGAAGGACUGGGACCCGAAG |
| | | AAGUACGGAGGAUUCGACAGCCCGACAGUCGCAUACAGCGUCCUGGUCGUCGCAAAGGUCGAAAAGGGA |
| | | AAGAGCAAGAAGCUGAAGAGCGUCAAGGAACUGCUGGGAAUCACAAUCAUGGAAAGAAGCAGCUUCGAA |
| | | AAGAACCCGAUCGACUUCCUGGAAGCAAAGGGAUACAAGGAAGUCAAGAAGGACCUGAUCAUCAAGCUG |
| | | CCGAAGUACAGCCUGUUCGAACUGGAAAACGGAAGAAAGAGAAUGCUGGCAAGCGCAGGAGAACUGCAG |
| | | AAGGGAAACGAACUGGCACUGCCGAGCAAGUACGUCAACUUCCUGUACCUGGCAAGCCACUACGAAAAG |
| | | CUGAAGGGAAGCCCGGAAGACAACGAACAGAAGCAGCUGUUCGUCGAACAGCACAAGCACUACCUGGAC |
| | | GAAAUCAUCGAACAGAUCAGCGAAUUCAGCAAGAGAGUCAUCCUGGCAGACGCAAACCUGGACAAGGUC |
| | | CUGAGCGCAUACAACAAGCACAGAGACAAGCCGAUCAGAGAACAGGCAGAAAACAUCAUCCACCUGUUC |
| | | ACACUGACAAACCUGGGAGCACCGGCAGCAUUCAAGUACUUCGACACAACAAUCGACAGAAAGAGAUAC |
| | | ACAAGCACAAAGGAAGUCCUGGACGCAACACUGAUCCACCAGAGCAUCACAGGACUGUACGAAACAAGA |
| | | AUCGACCUGAGCCAGCUGGGAGGAGAC |
| | | GGAAGCGGAAGCCCGAAGAAGAAGAGAAAGGUCGACGGAAGCCCGAAGAAGAAGAGAAAGGUCGACAGC |
| | | GGA |
| 1123 | DNA coding | GGGTCCCGCAGTCGGCGTCCAGCGGCTCTGCTTGTTCGTGTGTGTGTCGTTGCAGGCCTTATTCGGATCCGCC |
| | sequence for | ACCATGGACAAGAAGTACAGCATCGGACTGGACATCGGAACAAACAGCGTCGGATGGGCAGTCATCACAGA |
| | Cas9 transcript | CGAATACAAGGTCCCGAGCAAGAAGTTCAAGGTCCTGGGAAACACAGACAGACACAGCATCAAGAAGAAC |
| | | CTGATCGGAGCACTGCTGTTCGACAGCGGAGAAACAGCAGAAGCAACAAGACTGAAGAGAACAGCAAGAA |
| | | GAAGATACACAAGAAGAAAGAACAGAATCTGCTACCTGCAGGAAATCTTCAGCAACGAAATGGCAAAGGTC |
| | | GACGACAGCTTCTTCCACAGACTGGAAGAAAGCTTCCTGGTCGAAGAAGACAAGAAGCACGAAAGACACCC |
| | | GATCTTCGGAAACATCGTCGACGAAGTCGCATACCACGAAAAGTACCCGACAATCTACCACCTGAGAAAGA |
| | | AGCTGGTCGACAGCACAGACAAGGCAGACCTGAGACTGATCTACCTGGCACTGGCACACATGATCAAGTTC |
| | | AGAGGACACTTCCTGATCGAAGGAGACCTGAACCCGGACAACAGCGACGTCGACAAGCTGTTCATCCAGCT |
| | | GGTCCAGACATACAACCAGCTGTTCGAAGAAAACCCGATCAACGCAAGCGGAGTCGACGCAAAGGCAATCC |
| | | TGAGCGCAAGACTGAGCAAGAGCAGAAGACTGGAAAACCTGATCGCACAGCTGCCGGGAGAAAAGAAGAA |
| | | CGGACTGTTCGGAAACCTGATCGCACTGAGCCTGGGACTGACACCGAACTTCAAGAGCAACTTCGACCTGGC |
| | | AGAAGACGCAAAGCTGCAGCTGAGCAAGGACACATACGACGACGACCTGGACAACCTGCTGGCACAGATC |
| | | GGAGACCAGTACGCAGACCTGTTCCTGGCAGCAAAGAACCTGAGCGACGCAATCCTGCTGAGCGACATCCT |
| | | GAGAGTCAACACAGAAATCACAAAGGCACCGCTGAGCGCAAGCATGATCAAGAGATACGACGAACACCAC |
| | | CAGGACCTGACACTGCTGAAGGCACTGGTCAGACAGCAGCTGCCGGAAAAGTACAAGGAAATCTTCTTCGA |
| | | CCAGAGCAAGAACGGATACGCAGGATACATCGACGGAGGAGCAAGCCAGGAAGAATTCTACAAGTTCATCA |
| | | AGCCGATCCTGGAAAAGATGGACGGAACAGAAGAACTGCTGGTCAAGCTGAACAGAGAAGACCTGCTGAG |
| | | AAAGCAGAGAACATTCGACAACGGAAGCATCCCGCACCAGATCCACCTGGGAGAACTGCACGCAATCCTGA |
| | | GAAGACAGGAAGACTTCTACCCGTTCCTGAAGGACAACAGAGAAAAGATCGAAAAGATCCTGACATTCAGA |
| | | ATCCCGTACTACGTCGGACCGCTGGCAAGAGGAAACAGCAGATTCGCATGGATGACAAGAAAGAGCGAAGA |
| | | AACAATCACACCGTGGAACTTCGAAGAAGTCGTCGACAAGGGAGCAAGCGCACAGAGCTTCATCGAAAGAA |
| | | TGACAAACTTCGACAAGAACCTGCCGAACGAAAAGGTCCTGCCGAAGCACAGCCTGCTGTACGAATACTTC |
| | | ACAGTCTACAACGAACTGACAAAGGTCAAGTACGTCACAGAAGGAATGAGAAAGCCGGCATTCCTGAGCGG |
| | | AGAACAGAAGAAGGCAATCGTCGACCTGCTGTTCAAGACAAACAGAAAGGTCACAGTCAAGCAGCTGAAG |
| | | GAAGACTACTTCAAGAAGATCGAATGCTTCGACAGCGTCGAAATCAGCGGAGTCGAAGACAGATTCAACGC |
| | | AAGCCTGGGAACATACCACGACCTGCTGAAGATCATCAAGGACAAGGACTTCCTGGACAACGAAGAAAACG |
| | | AAGACATCCTGGAAGACATCGTCCTGACACTGACACTGTTCGAAGACAGAGAAATGATCGAAGAAAGACTG |
| | | AAGACATACGCACACCTGTTCGACGACAAGGTCATGAAGCAGCTGAAGAGAAGAAGATACACAGGATGGG |
| | | GAAGACTGAGCAGAAAGCTGATCAACGGAATCAGAGACAAGCAGAGCGGAAAGACAATCCTGGACTTCCT |
| | | GAAGAGCGACGGATTCGCAAACAGAAACTTCATGCAGCTGATCCACGACGACAGCCTGACATTCAAGGAAG |
| | | ACATCCAGAAGGCACAGGTCAGCGGACAGGGAGACAGCCTGCACGAACACATCGCAAACCTGGCAGGAAG |
| | | CCCGGCAATCAAGAAGGGAATCCTGCAGACAGTCAAGGTCGTCGACGAACTGGTCAAGGTCATGGGAAGAC |
| | | ACAAGCCGGAAAACATCGTCATCGAAATGGCAAGAGAAAACCAGACAACACAGAAGGGACAGAAGAACAG |
| | | CAGAGAAAGAATGAAGAGAATCGAAGAAGGAATCAAGGAACTGGGAAGCCAGATCCTGAAGGAACACCCG |
| | | GTCGAAAACACACAGCTGCAGAACGAAAAGCTGTACCTGTACTACCTGCAGAACGGAAGAGACATGTACGT |
| | | CGACCAGGAACTGGACATCAACAGACTGAGCGACTACGACGTCGACCACATCGTCCCGCAGAGCTTCCTGA |
| | | AGGACGACAGCATCGACAACAAGGTCCTGACAAGAAGCGACAAGAACAGAGGAAAGAGCGACAACGTCCC |
| | | GAGCGAAGAAGTCGTCAAGAAGATGAAGAACTACTGGAGACAGCTGCTGAACGCAAAGCTGATCACACAG |
| | | AGAAAGTTCGACAACCTGACAAAGGCAGAGAGAGGAGGACTGAGCGAACTGGACAAGGCAGGATTCATCA |
| | | AGAGACAGCTGGTCGAAACAAGACAGATCACAAAGCACGTCGCACAGATCCTGGACAGCAGAATGAACAC |
| | | AAAGTACGACGAAAACGACAAGCTGATCAGAGAAGTCAAGGTCATCACACTGAAGAGCAAGCTGGTCAGC |
| | | GACTTCAGAAAGGACTTCCAGTTCTACAAGGTCAGAGAAATCAACAACTACCACCACGCACACGACGCATA |
| | | CCTGAACGCAGTCGTCGGAACAGCACTGATCAAGAAGTACCCGAAGCTGGAAAGCGAATTCGTCTACGGAG |
| | | ACTACAAGGTCTACGACGTCAGAAAGATGATCGCAAAGAGCGAACAGGAAATCGGAAAGGCAACAGCAAA |
| | | GTACTTCTTCTACAGCAACATCATGAACTTCTTCAAGACAGAAATCACACTGGCAAACGGAGAAATCAGAAA |
| | | GAGACCGCTGATCGAAACAAACGGAGAAACAGGAGAAATCGTCTGGGACAAGGGAAGAGACTTCGCAACA |
| | | GTCAGAAAGGTCCTGAGCATGCCGCAGGTCAACATCGTCAAGAAGACAGAAGTCCAGACAGGAGGATTCAG |
| | | CAAGGAAAGCATCCTGCCGAAGAGAAACAGCGACAAGCTGATCGCAAGAAAGAAGGACTGGGACCCGAAG |
| | | AAGTACGGAGGATTCGACAGCCCGACAGTCGCATACAGCGTCCTGGTCGTCGCAAAGGTCGAAAAGGGAAA |
| | | GAGCAAGAAGCTGAAGAGCGTCAAGGAACTGCTGGGAATCACAATCATGGAAAGAAGCAGCTTCGAAAAG |
| | | AACCCGATCGACTTCCTGGAAGCAAAGGGATACAAGGAAGTCAAGAAGGACCTGATCATCAAGCTGCCGAA |
| | | GTACAGCCTGTTCGAACTGGAAAACGGAAGAAAGAGAATGCTGGCAAGCGCAGGAGAACTGCAGAAGGGA |
| | | AACGAACTGGCACTGCCGAGCAAGTACGTCAACTTCCTGTACCTGGCAAGCCACTACGAAAAGCTGAAGGG |
| | | AAGCCCGGAAGACAACGAACAGAAGCAGCTGTTCGTCGAACAGCACAAGCACTACCTGGACGAAATCATCG |
| | | AACAGATCAGCGAATTCAGCAAGAGAGTCATCCTGGCAGACGCAAACCTGGACAAGGTCCTGAGCGCATAC |
| | | AACAAGCACAGAGACAAGCCGATCAGAGAACAGGCAGAAAACATCATCCACCTGTTCACACTGACAAACCT |
| | | GGGAGCACCGGCAGCATTCAAGTACTTCGACACAACAATCGACAGAAAGAGATACACAAGCACAAAGGAA |
| | | GTCCTGGACGCAACACTGATCCACCAGAGCATCACAGGACTGTACGAAACAAGAATCGACCTGAGCCAGCT |
| | | GGGAGGAGACGGAGGAGGAAGCCCGAAGAAGAAGAGAAAGGTCTAGCTAGCCATCACATTTAAAAGCATC |
| | | TCAGCCTACCATGAGAATAAGAGAAAGAAAATGAAGATCAATAGCTTATTCATCTCTTTTTCTTTTTCGTTGG |
| | | TGTAAAGCCAACACCCTGTCTAAAAAACATAAATTTCTTTAATCATTTTGCCTCTTTTCTCTGTGCTTCAATTA |
| | | ATAAAAAATGGAAAGAACCTCGAG |
| 1124 | DNA coding | GGGTCCCGCAGTCGGCGTCCAGCGGCTCTGCTTGTTCGTGTGTGTGTCGTTGCAGGCCTTATTCGGATCCATG |
| | sequence for | GACAAGAAGTACAGCATCGGACTGGACATCGGAACAAACAGCGTCGGATGGGCAGTCATCACAGACGAATA |
| | Cas9 transcript | CAAGGTCCCGAGCAAGAAGTTCAAGGTCCTGGGAAACACAGACAGACACAGCATCAAGAAGAACCTGATC |
| | | GGAGCACTGCTGTTCGACAGCGGAGAAACAGCAGAAGCAACAAGACTGAAGAGAACAGCAAGAAGAAGAT |
| | | ACACAAGAAGAAAGAACAGAATCTGCTACCTGCAGGAAATCTTCAGCAACGAAATGGCAAAGGTCGACGAC |
| | | AGCTTCTTCCACAGACTGGAAGAAAGCTTCCTGGTCGAAGAAGACAAGAAGCACGAAAGACACCCGATCTT |
| | | CGGAAACATCGTCGACGAAGTCGCATACCACGAAAAGTACCCGACAATCTACCACCTGAGAAAGAAGCTGG |
| | | TCGACAGCACAGACAAGGCAGACCTGAGACTGATCTACCTGGCACTGGCACACATGATCAAGTTCAGAGGA |
| | | CACTTCCTGATCGAAGGAGACCTGAACCCGGACAACAGCGACGTCGACAAGCTGTTCATCCAGCTGGTCCA |
| | | GACATACAACCAGCTGTTCGAAGAAAACCCGATCAACGCAAGCGGAGTCGACGCAAAGGCAATCCTGAGCG |
| | | CAAGACTGAGCAAGAGCAGAAGACTGGAAAACCTGATCGCACAGCTGCCGGGAGAAAAGAAGAACGGACT |
| | | GTTCGGAAACCTGATCGCACTGAGCCTGGGACTGACACCGAACTTCAAGAGCAACTTCGACCTGGCAGAAG |
| | | ACGCAAAGCTGCAGCTGAGCAAGGACACATACGACGACGACCTGGACAACCTGCTGGCACAGATCGGAGAC |
| | | CAGTACGCAGACCTGTTCCTGGCAGCAAAGAACCTGAGCGACGCAATCCTGCTGAGCGACATCCTGAGAGT |
| | | CAACACAGAAATCACAAAGGCACCGCTGAGCGCAAGCATGATCAAGAGATACGACGAACACCACCAGGAC |
| | | CTGACACTGCTGAAGGCACTGGTCAGACAGCAGCTGCCGGAAAAGTACAAGGAAATCTTCTTCGACCAGAG |
| | | CAAGAACGGATACGCAGGATACATCGACGGAGGAGCAAGCCAGGAAGAATTCTACAAGTTCATCAAGCCGA |
| | | TCCTGGAAAAGATGGACGGAACAGAAGAACTGCTGGTCAAGCTGAACAGAGAAGACCTGCTGAGAAAGCA |
| | | GAGAACATTCGACAACGGAAGCATCCCGCACCAGATCCACCTGGGAGAACTGCACGCAATCCTGAGAAGAC |
| | | AGGAAGACTTCTACCCGTTCCTGAAGGACAACAGAGAAAAGATCGAAAAGATCCTGACATTCAGAATCCCG |
| | | TACTACGTCGGACCGCTGGCAAGAGGAAACAGCAGATTCGCATGGATGACAAGAAAGAGCGAAGAAACAA |
| | | TCACACCGTGGAACTTCGAAGAAGTCGTCGACAAGGGAGCAAGCGCACAGAGCTTCATCGAAAGAATGACA |
| | | AACTTCGACAAGAACCTGCCGAACGAAAAGGTCCTGCCGAAGCACAGCCTGCTGTACGAATACTTCACAGT |
| | | CTACAACGAACTGACAAAGGTCAAGTACGTCACAGAAGGAATGAGAAAGCCGGCATTCCTGAGCGGAGAAC |
| | | AGAAGAAGGCAATCGTCGACCTGCTGTTCAAGACAAACAGAAAGGTCACAGTCAAGCAGCTGAAGGAAGA |
| | | CTACTTCAAGAAGATCGAATGCTTCGACAGCGTCGAAATCAGCGGAGTCGAAGACAGATTCAACGCAAGCC |
| | | TGGGAACATACCACGACCTGCTGAAGATCATCAAGGACAAGGACTTCCTGGACAACGAAGAAAACGAAGAC |
| | | ATCCTGGAAGACATCGTCCTGACACTGACACTGTTCGAAGACAGAGAAATGATCGAAGAAAGACTGAAGAC |
| | | ATACGCACACCTGTTCGACGACAAGGTCATGAAGCAGCTGAAGAGAAGAAGATACACAGGATGGGGAAGA |
| | | CTGAGCAGAAAGCTGATCAACGGAATCAGAGACAAGCAGAGCGGAAAGACAATCCTGGACTTCCTGAAGA |
| | | GCGACGGATTCGCAAACAGAAACTTCATGCAGCTGATCCACGACGACAGCCTGACATTCAAGGAAGACATC |
| | | CAGAAGGCACAGGTCAGCGGACAGGGAGACAGCCTGCACGAACACATCGCAAACCTGGCAGGAAGCCCGG |
| | | CAATCAAGAAGGGAATCCTGCAGACAGTCAAGGTCGTCGACGAACTGGTCAAGGTCATGGGAAGACACAAG |
| | | CCGGAAAACATCGTCATCGAAATGGCAAGAGAAAACCAGACAACACAGAAGGGACAGAAGAACAGCAGAG |
| | | AAAGAATGAAGAGAATCGAAGAAGGAATCAAGGAACTGGGAAGCCAGATCCTGAAGGAACACCCGGTCGA |
| | | AAACACACAGCTGCAGAACGAAAAGCTGTACCTGTACTACCTGCAGAACGGAAGAGACATGTACGTCGACC |
| | | AGGAACTGGACATCAACAGACTGAGCGACTACGACGTCGACCACATCGTCCCGCAGAGCTTCCTGAAGGAC |
| | | GACAGCATCGACAACAAGGTCCTGACAAGAAGCGACAAGAACAGAGGAAAGAGCGACAACGTCCCGAGCG |
| | | AAGAAGTCGTCAAGAAGATGAAGAACTACTGGAGACAGCTGCTGAACGCAAAGCTGATCACACAGAGAAA |
| | | GTTCGACAACCTGACAAAGGCAGAGAGAGGAGGACTGAGCGAACTGGACAAGGCAGGATTCATCAAGAGA |
| | | CAGCTGGTCGAAACAAGACAGATCACAAAGCACGTCGCACAGATCCTGGACAGCAGAATGAACACAAAGT |
| | | ACGACGAAAACGACAAGCTGATCAGAGAAGTCAAGGTCATCACACTGAAGAGCAAGCTGGTCAGCGACTTC |
| | | AGAAAGGACTTCCAGTTCTACAAGGTCAGAGAAATCAACAACTACCACCACGCACACGACGCATACCTGAA |
| | | CGCAGTCGTCGGAACAGCACTGATCAAGAAGTACCCGAAGCTGGAAAGCGAATTCGTCTACGGAGACTACA |
| | | AGGTCTACGACGTCAGAAAGATGATCGCAAAGAGCGAACAGGAAATCGGAAAGGCAACAGCAAAGTACTT |
| | | CTTCTACAGCAACATCATGAACTTCTTCAAGACAGAAATCACACTGGCAAACGGAGAAATCAGAAAGAGAC |
| | | CGCTGATCGAAACAAACGGAGAAACAGGAGAAATCGTCTGGGACAAGGGAAGAGACTTCGCAACAGTCAG |
| | | AAAGGTCCTGAGCATGCCGCAGGTCAACATCGTCAAGAAGACAGAAGTCCAGACAGGAGGATTCAGCAAGG |
| | | AAAGCATCCTGCCGAAGAGAAACAGCGACAAGCTGATCGCAAGAAAGAAGGACTGGGACCCGAAGAAGTA |
| | | CGGAGGATTCGACAGCCCGACAGTCGCATACAGCGTCCTGGTCGTCGCAAAGGTCGAAAAGGGAAAGAGCA |
| | | AGAAGCTGAAGAGCGTCAAGGAACTGCTGGGAATCACAATCATGGAAAGAAGCAGCTTCGAAAAGAACCC |
| | | GATCGACTTCCTGGAAGCAAAGGGATACAAGGAAGTCAAGAAGGACCTGATCATCAAGCTGCCGAAGTACA |
| | | GCCTGTTCGAACTGGAAAACGGAAGAAAGAGAATGCTGGCAAGCGCAGGAGAACTGCAGAAGGGAAACGA |
| | | ACTGGCACTGCCGAGCAAGTACGTCAACTTCCTGTACCTGGCAAGCCACTACGAAAAGCTGAAGGGAAGCC |
| | | CGGAAGACAACGAACAGAAGCAGCTGTTCGTCGAACAGCACAAGCACTACCTGGACGAAATCATCGAACAG |
| | | ATCAGCGAATTCAGCAAGAGAGTCATCCTGGCAGACGCAAACCTGGACAAGGTCCTGAGCGCATACAACAA |
| | | GCACAGAGACAAGCCGATCAGAGAACAGGCAGAAAACATCATCCACCTGTTCACACTGACAAACCTGGGAG |
| | | CACCGGCAGCATTCAAGTACTTCGACACAACAATCGACAGAAAGAGATACACAAGCACAAAGGAAGTCCTG |
| | | GACGCAACACTGATCCACCAGAGCATCACAGGACTGTACGAAACAAGAATCGACCTGAGCCAGCTGGGAGG |
| | | AGACGGAGGAGGAAGCCCGAAGAAGAAGAGAAAGGTCTAGCTAGCCATCACATTTAAAAGCATCTCAGCCT |
| | | ACCATGAGAATAAGAGAAAGAAAATGAAGATCAATAGCTTATTCATCTCTTTTTCTTTTTCGTTGGTGTAAA |
| | | GCCAACACCCTGTCTAAAAAACATAAATTTCTTTAATCATTTTGCCTCTTTTCTCTGTGCTTCAATTAATAAA |
| | | AAATGGAAAGAACCTCGAG |
| 1125 | Cas9 ORF | ATGGACAAGAAGTACAGCATCGGACTGGACATCGGAACAAACAGCGTCGGATGGGCAGTCATCACAGACGA |
| | | ATACAAGGTCCCGAGCAAGAAGTTCAAGGTCCTGGGAAACACAGACAGACACAGCATCAAGAAGAACCTG |
| | | ATCGGAGCACTGCTGTTCGACAGCGGAGAAACAGCAGAAGCAACAAGACTGAAGAGAACAGCAAGAAGAA |
| | | GATACACAAGAAGAAAGAACAGAATCTGCTACCTGCAGGAAATCTTCAGCAACGAAATGGCAAAGGTCGAC |
| | | GACAGCTTCTTCCACcggCTGGAAGAAAGCTTCCTGGTCGAAGAAGACAAGAAGCACGAAAGACACCCGATC |
| | | TTCGGAAACATCGTCGACGAAGTCGCATACCACGAAAAGTACCCGACAATCTACCACCTGAGAAAGAAGCT |
| | | GGTCGACAGCACAGACAAGGCAGACCTGAGACTGATCTACCTGGCACTGGCACACATGATCAAGTTCAGAG |
| | | GACACTTCCTGATCGAAGGAGACCTGAACCCGGACAACAGCGACGTCGACAAGCTGTTCATCCAGCTGGTC |
| | | CAGACATACAACCAGCTGTTCGAAGAAAACCCGATCAACGCAAGCGGAGTCGACGCAAAGGCAATCCTGAG |
| | | CGCAAGACTGAGCAAGAGCAGAAGACTGGAAAACCTGATCGCACAGCTGCCGGGAGAAAAGAAGAACGGA |
| | | CTGTTCGGAAACCTGATCGCACTGAGCCTGGGACTGACACCGAACTTCAAGAGCAACTTCGACCTGGCAGA |
| | | AGACGCAAAGCTGCAGCTGAGCAAGGACACATACGACGACGACCTGGACAACCTGCTGGCACAGATCGGA |
| | | GACCAGTACGCAGACCTGTTCCTGGCAGCAAAGAACCTGAGCGACGCAATCCTGCTGAGCGACATCCTGAG |
| | | AGTCAACACAGAAATCACAAAGGCACCGCTGAGCGCAAGCATGATCAAGAGATACGACGAACACCACCAG |
| | | GACCTGACACTGCTGAAGGCACTGGTCAGACAGCAGCTGCCGGAAAAGTACAAGGAAATCTTCTTCGACCA |
| | | GAGCAAGAACGGATACGCAGGATACATCGACGGAGGAGCAAGCCAGGAAGAATTCTACAAGTTCATCAAG |
| | | CCGATCCTGGAAAAGATGGACGGAACAGAAGAACTGCTGGTCAAGCTGAACAGAGAAGACCTGCTGAGAA |
| | | AGCAGAGAACATTCGACAACGGAAGCATCCCGCACCAGATCCACCTGGGAGAACTGCACGCAATCCTGAGA |
| | | AGACAGGAAGACTTCTACCCGTTCCTGAAGGACAACAGAGAAAAGATCGAAAAGATCCTGACATTCAGAAT |
| | | CCCGTACTACGTCGGACCGCTGGCAAGAGGAAACAGCAGATTCGCATGGATGACAAGAAAGAGCGAAGAA |
| | | ACAATCACACCGTGGAACTTCGAAGAAGTCGTCGACAAGGGAGCAAGCGCACAGAGCTTCATCGAAAGAAT |
| | | GACAAACTTCGACAAGAACCTGCCGAACGAAAAGGTCCTGCCGAAGCACAGCCTGCTGTACGAATACTTCA |
| | | CAGTCTACAACGAACTGACAAAGGTCAAGTACGTCACAGAAGGAATGAGAAAGCCGGCATTCCTGAGCGGA |
| | | GAACAGAAGAAGGCAATCGTCGACCTGCTGTTCAAGACAAACAGAAAGGTCACAGTCAAGCAGCTGAAGG |
| | | AAGACTACTTCAAGAAGATCGAATGCTTCGACAGCGTCGAAATCAGCGGAGTCGAAGACAGATTCAACGCA |
| | | AGCCTGGGAACATACCACGACCTGCTGAAGATCATCAAGGACAAGGACTTCCTGGACAACGAAGAAAACGA |
| | | AGACATCCTGGAAGACATCGTCCTGACACTGACACTGTTCGAAGACAGAGAAATGATCGAAGAAAGACTGA |
| | | AGACATACGCACACCTGTTCGACGACAAGGTCATGAAGCAGCTGAAGAGAAGAAGATACACAGGATGGGG |
| | | AAGACTGAGCAGAAAGCTGATCAACGGAATCAGAGACAAGCAGAGCGGAAAGACAATCCTGGACTTCCTG |
| | | AAGAGCGACGGATTCGCAAACAGAAACTTCATGCAGCTGATCCACGACGACAGCCTGACATTCAAGGAAGA |
| | | CATCCAGAAGGCACAGGTCAGCGGACAGGGAGACAGCCTGCACGAACACATCGCAAACCTGGCAGGAAGC |
| | | CCGGCAATCAAGAAGGGAATCCTGCAGACAGTCAAGGTCGTCGACGAACTGGTCAAGGTCATGGGAAGACA |
| | | CAAGCCGGAAAACATCGTCATCGAAATGGCAAGAGAAAACCAGACAACACAGAAGGGACAGAAGAACAGC |
| | | AGAGAAAGAATGAAGAGAATCGAAGAAGGAATCAAGGAACTGGGAAGCCAGATCCTGAAGGAACACCCGG |
| | | TCGAAAACACACAGCTGCAGAACGAAAAGCTGTACCTGTACTACCTGCAaAACGGAAGAGACATGTACGTC |
| | | GACCAGGAACTGGACATCAACAGACTGAGCGACTACGACGTCGACCACATCGTCCCGCAGAGCTTCCTGAA |
| | | GGACGACAGCATCGACAACAAGGTCCTGACAAGAAGCGACAAGAACAGAGGAAAGAGCGACAACGTCCCG |
| | | AGCGAAGAAGTCGTCAAGAAGATGAAGAACTACTGGAGACAGCTGCTGAACGCAAAGCTGATCACACAGA |
| | | GAAAGTTCGACAACCTGACAAAGGCAGAGAGAGGAGGACTGAGCGAACTGGACAAGGCAGGATTCATCAA |
| | | GAGACAGCTGGTCGAAACAAGACAGATCACAAAGCACGTCGCACAGATCCTGGACAGCAGAATGAACACA |
| | | AAGTACGACGAAAACGACAAGCTGATCAGAGAAGTCAAGGTCATCACACTGAAGAGCAAGCTGGTCAGCG |
| | | ACTTCAGAAAGGACTTCCAGTTCTACAAGGTCAGAGAAATCAACAACTACCACCACGCACACGACGCATAC |
| | | CTGAACGCAGTCGTCGGAACAGCACTGATCAAGAAGTACCCGAAGCTGGAAAGCGAATTCGTCTACGGAGA |
| | | CTACAAGGTCTACGACGTCAGAAAGATGATCGCAAAGAGCGAACAGGAAATCGGAAAGGCAACAGCAAAG |
| | | TACTTCTTCTACAGCAACATCATGAACTTCTTCAAGACAGAAATCACACTGGCAAACGGAGAAATCAGAAAG |
| | | AGACCGCTGATCGAAACAAACGGAGAAACAGGAGAAATCGTCTGGGACAAGGGAAGAGACTTCGCAACAG |
| | | TCAGAAAGGTCCTGAGCATGCCGCAGGTCAACATCGTCAAGAAGACAGAAGTCCAGACAGGAGGATTCAGC |
| | | AAGGAAAGCATCCTGCCGAAGAGAAACAGCGACAAGCTGATCGCAAGAAAGAAGGACTGGGACCCGAAGA |
| | | AGTACGGAGGATTCGACAGCCCGACAGTCGCATACAGCGTCCTGGTCGTCGCAAAGGTCGAAAAGGGAAAG |
| | | AGCAAGAAGCTGAAGAGCGTCAAGGAACTGCTGGGAATCACAATCATGGAAAGAAGCAGCTTCGAAAAGA |
| | | ACCCGATCGACTTCCTGGAAGCAAAGGGATACAAGGAAGTCAAGAAGGACCTGATCATCAAGCTGCCGAAG |
| | | TACAGCCTGTTCGAACTGGAAAACGGAAGAAAGAGAATGCTGGCAAGCGCAGGAGAACTGCAGAAGGGAA |
| | | ACGAACTGGCACTGCCGAGCAAGTACGTCAACTTCCTGTACCTGGCAAGCCACTACGAAAAGCTGAAGGGA |
| | | AGCCCGGAAGACAACGAACAGAAGCAGCTGTTCGTCGAACAGCACAAGCACTACCTGGACGAAATCATCGA |
| | | ACAGATCAGCGAATTCAGCAAGAGAGTCATCCTGGCAGACGCAAACCTGGACAAGGTCCTGAGCGCATACA |
| | | ACAAGCACAGAGACAAGCCGATCAGAGAACAGGCAGAAAACATCATCCACCTGTTCACACTGACAAACCTG |
| | | GGAGCACCGGCAGCATTCAAGTACTTCGACACAACAATCGACAGAAAGAGATACACAAGCACAAAGGAAG |
| | | TCCTGGACGCAACACTGATCCACCAGAGCATCACAGGACTGTACGAAACAAGAATCGACCTGAGCCAGCTG |
| | | GGAGGAGACGGAGGAGGAAGCCCGAAGAAGAAGAGAAAGGTCTAG |
| 1126 | Cas9 ORF | ATGGACAAGAAGTACAGCATCGGCCTGGACATCGGCACCAACAGCGTGGGCTGGGCCGTGATCACCGACGA |
| | | GTACAAGGTGCCCAGCAAGAAGTTCAAGGTGCTGGGCAACACCGACAGACACAGCATCAAGAAGAACCTG |
| | | ATCGGCGCCCTGCTGTTCGACAGCGGCGAGACCGCCGAGGCCACCAGACTGAAGAGAACCGCCAGAAGAAG |
| | | ATACACCAGAAGAAAGAACAGAATCTGCTACCTGCAGGAGATCTTCAGCAACGAGATGGCCAAGGTGGACG |
| | | ACAGCTTCTTCCACAGACTGGAGGAGAGCTTCCTGGTGGAGGAGGACAAGAAGCACGAGAGACACCCCATC |
| | | TTCGGCAACATCGTGGACGAGGTGGCCTACCACGAGAAGTACCCCACCATCTACCACCTGAGAAAGAAGCT |
| | | GGTGGACAGCACCGACAAGGCCGACCTGAGACTGATCTACCTGGCCCTGGCCCACATGATCAAGTTCAGAG |
| | | GCCACTTCCTGATCGAGGGCGACCTGAACCCCGACAACAGCGACGTGGACAAGCTGTTCATCCAGCTGGTGC |
| | | AGACCTACAACCAGCTGTTCGAGGAGAACCCCATCAACGCCAGCGGCGTGGACGCCAAGGCCATCCTGAGC |
| | | GCCAGACTGAGCAAGAGCAGAAGACTGGAGAACCTGATCGCCCAGCTGCCCGGCGAGAAGAAGAACGGCC |
| | | TGTTCGGCAACCTGATCGCCCTGAGCCTGGGCCTGACCCCCAACTTCAAGAGCAACTTCGACCTGGCCGAGG |
| | | ACGCCAAGCTGCAGCTGAGCAAGGACACCTACGACGACGACCTGGACAACCTGCTGGCCCAGATCGGCGAC |
| | | CAGTACGCCGACCTGTTCCTGGCCGCCAAGAACCTGAGCGACGCCATCCTGCTGAGCGACATCCTGAGAGTG |
| | | AACACCGAGATCACCAAGGCCCCCCTGAGCGCCAGCATGATCAAGAGATACGACGAGCACCACCAGGACCT |
| | | GACCCTGCTGAAGGCCCTGGTGAGACAGCAGCTGCCCGAGAAGTACAAGGAGATCTTCTTCGACCAGAGCA |
| | | AGAACGGCTACGCCGGCTACATCGACGGCGGCGCCAGCCAGGAGGAGTTCTACAAGTTCATCAAGCCCATC |
| | | CTGGAGAAGATGGACGGCACCGAGGAGCTGCTGGTGAAGCTGAACAGAGAGGACCTGCTGAGAAAGCAGA |
| | | GAACCTTCGACAACGGCAGCATCCCCCACCAGATCCACCTGGGCGAGCTGCACGCCATCCTGAGAAGACAG |
| | | GAGGACTTCTACCCCTTCCTGAAGGACAACAGAGAGAAGATCGAGAAGATCCTGACCTTCAGAATCCCCTA |
| | | CTACGTGGGCCCCCTGGCCAGAGGCAACAGCAGATTCGCCTGGATGACCAGAAAGAGCGAGGAGACCATCA |
| | | CCCCCTGGAACTTCGAGGAGGTGGTGGACAAGGGCGCCAGCGCCCAGAGCTTCATCGAGAGAATGACCAAC |
| | | TTCGACAAGAACCTGCCCAACGAGAAGGTGCTGCCCAAGCACAGCCTGCTGTACGAGTACTTCACCGTGTAC |
| | | AACGAGCTGACCAAGGTGAAGTACGTGACCGAGGGCATGAGAAAGCCCGCCTTCCTGAGCGGCGAGCAGA |
| | | AGAAGGCCATCGTGGACCTGCTGTTCAAGACCAACAGAAAGGTGACCGTGAAGCAGCTGAAGGAGGACTAC |
| | | TTCAAGAAGATCGAGTGCTTCGACAGCGTGGAGATCAGCGGCGTGGAGGACAGATTCAACGCCAGCCTGGG |
| | | CACCTACCACGACCTGCTGAAGATCATCAAGGACAAGGACTTCCTGGACAACGAGGAGAACGAGGACATCC |
| | | TGGAGGACATCGTGCTGACCCTGACCCTGTTCGAGGACAGAGAGATGATCGAGGAGAGACTGAAGACCTAC |
| | | GCCCACCTGTTCGACGACAAGGTGATGAAGCAGCTGAAGAGAAGAAGATACACCGGCTGGGGCAGACTGAG |
| | | CAGAAAGCTGATCAACGGCATCAGAGACAAGCAGAGCGGCAAGACCATCCTGGACTTCCTGAAGAGCGACG |
| | | GCTTCGCCAACAGAAACTTCATGCAGCTGATCCACGACGACAGCCTGACCTTCAAGGAGGACATCCAGAAG |
| | | GCCCAGGTGAGCGGCCAGGGCGACAGCCTGCACGAGCACATCGCCAACCTGGCCGGCAGCCCCGCCATCAA |
| | | GAAGGGCATCCTGCAGACCGTGAAGGTGGTGGACGAGCTGGTGAAGGTGATGGGCAGACACAAGCCCGAG |
| | | AACATCGTGATCGAGATGGCCAGAGAGAACCAGACCACCCAGAAGGGCCAGAAGAACAGCAGAGAGAGAA |
| | | TGAAGAGAATCGAGGAGGGCATCAAGGAGCTGGGCAGCCAGATCCTGAAGGAGCACCCCGTGGAGAACAC |
| | | CCAGCTGCAGAACGAGAAGCTGTACCTGTACTACCTGCAGAACGGCAGAGACATGTACGTGGACCAGGAGC |
| | | TGGACATCAACAGACTGAGCGACTACGACGTGGACCACATCGTGCCCCAGAGCTTCCTGAAGGACGACAGC |
| | | ATCGACAACAAGGTGCTGACCAGAAGCGACAAGAACAGAGGCAAGAGCGACAACGTGCCCAGCGAGGAGG |
| | | TGGTGAAGAAGATGAAGAACTACTGGAGACAGCTGCTGAACGCCAAGCTGATCACCCAGAGAAAGTTCGAC |
| | | AACCTGACCAAGGCCGAGAGAGGCGGCCTGAGCGAGCTGGACAAGGCCGGCTTCATCAAGAGACAGCTGGT |
| | | GGAGACCAGACAGATCACCAAGCACGTGGCCCAGATCCTGGACAGCAGAATGAACACCAAGTACGACGAG |
| | | AACGACAAGCTGATCAGAGAGGTGAAGGTGATCACCCTGAAGAGCAAGCTGGTGAGCGACTTCAGAAAGG |
| | | ACTTCCAGTTCTACAAGGTGAGAGAGATCAACAACTACCACCACGCCCACGACGCCTACCTGAACGCCGTG |
| | | GTGGGCACCGCCCTGATCAAGAAGTACCCCAAGCTGGAGAGCGAGTTCGTGTACGGCGACTACAAGGTGTA |
| | | CGACGTGAGAAAGATGATCGCCAAGAGCGAGCAGGAGATCGGCAAGGCCACCGCCAAGTACTTCTTCTACA |
| | | GCAACATCATGAACTTCTTCAAGACCGAGATCACCCTGGCCAACGGCGAGATCAGAAAGAGACCCCTGATC |
| | | GAGACCAACGGCGAGACCGGCGAGATCGTGTGGGACAAGGGCAGAGACTTCGCCACCGTGAGAAAGGTGC |
| | | TGAGCATGCCCCAGGTGAACATCGTGAAGAAGACCGAGGTGCAGACCGGCGGCTTCAGCAAGGAGAGCATC |
| | | CTGCCCAAGAGAAACAGCGACAAGCTGATCGCCAGAAAGAAGGACTGGGACCCCAAGAAGTACGGCGGCT |
| | | TCGACAGCCCCACCGTGGCCTACAGCGTGCTGGTGGTGGCCAAGGTGGAGAAGGGCAAGAGCAAGAAGCTG |
| | | AAGAGCGTGAAGGAGCTGCTGGGCATCACCATCATGGAGAGAAGCAGCTTCGAGAAGAACCCCATCGACTT |
| | | CCTGGAGGCCAAGGGCTACAAGGAGGTGAAGAAGGACCTGATCATCAAGCTGCCCAAGTACAGCCTGTTCG |
| | | AGCTGGAGAACGGCAGAAAGAGAATGCTGGCCAGCGCCGGCGAGCTGCAGAAGGGCAACGAGCTGGCCCT |
| | | GCCCAGCAAGTACGTGAACTTCCTGTACCTGGCCAGCCACTACGAGAAGCTGAAGGGCAGCCCCGAGGACA |
| | | ACGAGCAGAAGCAGCTGTTCGTGGAGCAGCACAAGCACTACCTGGACGAGATCATCGAGCAGATCAGCGAG |
| | | TTCAGCAAGAGAGTGATCCTGGCCGACGCCAACCTGGACAAGGTGCTGAGCGCCTACAACAAGCACAGAGA |
| | | CAAGCCCATCAGAGAGCAGGCCGAGAACATCATCCACCTGTTCACCCTGACCAACCTGGGCGCCCCCGCCG |
| | | CCTTCAAGTACTTCGACACCACCATCGACAGAAAGAGATACACCAGCACCAAGGAGGTGCTGGACGCCACC |
| | | CTGATCCACCAGAGCATCACCGGCCTGTACGAGACCAGAATCGACCTGAGCCAGCTGGGCGGCGACGGCGG |
| | | CGGCAGCCCCAAGAAGAAGAGAAAGGTGTGA |
| 1127 | DNA coding | GGGTCCCGCAGTCGGCGTCCAGCGGCTCTGCTTGTTCGTGTGTGTGTCGTTGCAGGCCTTATTCGGATCCGCC |
| | sequence for | ACCATGGACAAGAAGTACAGCATCGGCCTGGACATCGGCACCAACAGCGTGGGCTGGGCCGTGATCACCGA |
| | Cas9 transcript | CGAGTACAAGGTGCCCAGCAAGAAGTTCAAGGTGCTGGGCAACACCGACAGACACAGCATCAAGAAGAAC |
| | | CTGATCGGCGCCCTGCTGTTCGACAGCGGCGAGACCGCCGAGGCCACCAGACTGAAGAGAACCGCCAGAAG |
| | | AAGATACACCAGAAGAAAGAACAGAATCTGCTACCTGCAGGAGATCTTCAGCAACGAGATGGCCAAGGTGG |
| | | ACGACAGCTTCTTCCACAGACTGGAGGAGAGCTTCCTGGTGGAGGAGGACAAGAAGCACGAGAGACACCCC |
| | | ATCTTCGGCAACATCGTGGACGAGGTGGCCTACCACGAGAAGTACCCCACCATCTACCACCTGAGAAAGAA |
| | | GCTGGTGGACAGCACCGACAAGGCCGACCTGAGACTGATCTACCTGGCCCTGGCCCACATGATCAAGTTCA |
| | | GAGGCCACTTCCTGATCGAGGGCGACCTGAACCCCGACAACAGCGACGTGGACAAGCTGTTCATCCAGCTG |
| | | GTGCAGACCTACAACCAGCTGTTCGAGGAGAACCCCATCAACGCCAGCGGCGTGGACGCCAAGGCCATCCT |
| | | GAGCGCCAGACTGAGCAAGAGCAGAAGACTGGAGAACCTGATCGCCCAGCTGCCCGGCGAGAAGAAGAAC |
| | | GGCCTGTTCGGCAACCTGATCGCCCTGAGCCTGGGCCTGACCCCCAACTTCAAGAGCAACTTCGACCTGGCC |
| | | GAGGACGCCAAGCTGCAGCTGAGCAAGGACACCTACGACGACGACCTGGACAACCTGCTGGCCCAGATCGG |
| | | CGACCAGTACGCCGACCTGTTCCTGGCCGCCAAGAACCTGAGCGACGCCATCCTGCTGAGCGACATCCTGAG |
| | | AGTGAACACCGAGATCACCAAGGCCCCCCTGAGCGCCAGCATGATCAAGAGATACGACGAGCACCACCAGG |
| | | ACCTGACCCTGCTGAAGGCCCTGGTGAGACAGCAGCTGCCCGAGAAGTACAAGGAGATCTTCTTCGACCAG |
| | | AGCAAGAACGGCTACGCCGGCTACATCGACGGCGGCGCCAGCCAGGAGGAGTTCTACAAGTTCATCAAGCC |
| | | CATCCTGGAGAAGATGGACGGCACCGAGGAGCTGCTGGTGAAGCTGAACAGAGAGGACCTGCTGAGAAAG |
| | | CAGAGAACCTTCGACAACGGCAGCATCCCCCACCAGATCCACCTGGGCGAGCTGCACGCCATCCTGAGAAG |
| | | ACAGGAGGACTTCTACCCCTTCCTGAAGGACAACAGAGAGAAGATCGAGAAGATCCTGACCTTCAGAATCC |
| | | CCTACTACGTGGGCCCCCTGGCCAGAGGCAACAGCAGATTCGCCTGGATGACCAGAAAGAGCGAGGAGACC |
| | | ATCACCCCCTGGAACTTCGAGGAGGTGGTGGACAAGGGCGCCAGCGCCCAGAGCTTCATCGAGAGAATGAC |
| | | CAACTTCGACAAGAACCTGCCCAACGAGAAGGTGCTGCCCAAGCACAGCCTGCTGTACGAGTACTTCACCGT |
| | | GTACAACGAGCTGACCAAGGTGAAGTACGTGACCGAGGGCATGAGAAAGCCCGCCTTCCTGAGCGGCGAGC |
| | | AGAAGAAGGCCATCGTGGACCTGCTGTTCAAGACCAACAGAAAGGTGACCGTGAAGCAGCTGAAGGAGGA |
| | | CTACTTCAAGAAGATCGAGTGCTTCGACAGCGTGGAGATCAGCGGCGTGGAGGACAGATTCAACGCCAGCC |
| | | TGGGCACCTACCACGACCTGCTGAAGATCATCAAGGACAAGGACTTCCTGGACAACGAGGAGAACGAGGAC |
| | | ATCCTGGAGGACATCGTGCTGACCCTGACCCTGTTCGAGGACAGAGAGATGATCGAGGAGAGACTGAAGAC |
| | | CTACGCCCACCTGTTCGACGACAAGGTGATGAAGCAGCTGAAGAGAAGAAGATACACCGGCTGGGGCAGAC |
| | | TGAGCAGAAAGCTGATCAACGGCATCAGAGACAAGCAGAGCGGCAAGACCATCCTGGACTTCCTGAAGAGC |
| | | GACGGCTTCGCCAACAGAAACTTCATGCAGCTGATCCACGACGACAGCCTGACCTTCAAGGAGGACATCCA |
| | | GAAGGCCCAGGTGAGCGGCCAGGGCGACAGCCTGCACGAGCACATCGCCAACCTGGCCGGCAGCCCCGCCA |
| | | TCAAGAAGGGCATCCTGCAGACCGTGAAGGTGGTGGACGAGCTGGTGAAGGTGATGGGCAGACACAAGCCC |
| | | GAGAACATCGTGATCGAGATGGCCAGAGAGAACCAGACCACCCAGAAGGGCCAGAAGAACAGCAGAGAGA |
| | | GAATGAAGAGAATCGAGGAGGGCATCAAGGAGCTGGGCAGCCAGATCCTGAAGGAGCACCCCGTGGAGAA |
| | | CACCCAGCTGCAGAACGAGAAGCTGTACCTGTACTACCTGCAGAACGGCAGAGACATGTACGTGGACCAGG |
| | | AGCTGGACATCAACAGACTGAGCGACTACGACGTGGACCACATCGTGCCCCAGAGCTTCCTGAAGGACGAC |
| | | AGCATCGACAACAAGGTGCTGACCAGAAGCGACAAGAACAGAGGCAAGAGCGACAACGTGCCCAGCGAGG |
| | | AGGTGGTGAAGAAGATGAAGAACTACTGGAGACAGCTGCTGAACGCCAAGCTGATCACCCAGAGAAAGTTC |
| | | GACAACCTGACCAAGGCCGAGAGAGGCGGCCTGAGCGAGCTGGACAAGGCCGGCTTCATCAAGAGACAGC |
| | | TGGTGGAGACCAGACAGATCACCAAGCACGTGGCCCAGATCCTGGACAGCAGAATGAACACCAAGTACGAC |
| | | GAGAACGACAAGCTGATCAGAGAGGTGAAGGTGATCACCCTGAAGAGCAAGCTGGTGAGCGACTTCAGAA |
| | | AGGACTTCCAGTTCTACAAGGTGAGAGAGATCAACAACTACCACCACGCCCACGACGCCTACCTGAACGCC |
| | | GTGGTGGGCACCGCCCTGATCAAGAAGTACCCCAAGCTGGAGAGCGAGTTCGTGTACGGCGACTACAAGGT |
| | | GTACGACGTGAGAAAGATGATCGCCAAGAGCGAGCAGGAGATCGGCAAGGCCACCGCCAAGTACTTCTTCT |
| | | ACAGCAACATCATGAACTTCTTCAAGACCGAGATCACCCTGGCCAACGGCGAGATCAGAAAGAGACCCCTG |
| | | ATCGAGACCAACGGCGAGACCGGCGAGATCGTGTGGGACAAGGGCAGAGACTTCGCCACCGTGAGAAAGG |
| | | TGCTGAGCATGCCCCAGGTGAACATCGTGAAGAAGACCGAGGTGCAGACCGGCGGCTTCAGCAAGGAGAGC |
| | | ATCCTGCCCAAGAGAAACAGCGACAAGCTGATCGCCAGAAAGAAGGACTGGGACCCCAAGAAGTACGGCG |
| | | GCTTCGACAGCCCCACCGTGGCCTACAGCGTGCTGGTGGTGGCCAAGGTGGAGAAGGGCAAGAGCAAGAAG |
| | | CTGAAGAGCGTGAAGGAGCTGCTGGGCATCACCATCATGGAGAGAAGCAGCTTCGAGAAGAACCCCATCGA |
| | | CTTCCTGGAGGCCAAGGGCTACAAGGAGGTGAAGAAGGACCTGATCATCAAGCTGCCCAAGTACAGCCTGT |
| | | TCGAGCTGGAGAACGGCAGAAAGAGAATGCTGGCCAGCGCCGGCGAGCTGCAGAAGGGCAACGAGCTGGC |
| | | CCTGCCCAGCAAGTACGTGAACTTCCTGTACCTGGCCAGCCACTACGAGAAGCTGAAGGGCAGCCCCGAGG |
| | | ACAACGAGCAGAAGCAGCTGTTCGTGGAGCAGCACAAGCACTACCTGGACGAGATCATCGAGCAGATCAGC |
| | | GAGTTCAGCAAGAGAGTGATCCTGGCCGACGCCAACCTGGACAAGGTGCTGAGCGCCTACAACAAGCACAG |
| | | AGACAAGCCCATCAGAGAGCAGGCCGAGAACATCATCCACCTGTTCACCCTGACCAACCTGGGCGCCCCCG |
| | | CCGCCTTCAAGTACTTCGACACCACCATCGACAGAAAGAGATACACCAGCACCAAGGAGGTGCTGGACGCC |
| | | ACCCTGATCCACCAGAGCATCACCGGCCTGTACGAGACCAGAATCGACCTGAGCCAGCTGGGCGGCGACGG |
| | | CGGCGGCAGCCCCAAGAAGAAGAGAAAGGTGTGACTAGCCATCACATTTAAAAGCATCTCAGCCTACCATG |
| | | AGAATAAGAGAAAGAAAATGAAGATCAATAGCTTATTCATCTCTTTTTCTTTTTCGTTGGTGTAAAGCCAAC |
| | | ACCCTGTCTAAAAAACATAAATTTCTTTAATCATTTTGCCTCTTTTCTCTGTGCTTCAATTAATAAAAAATGG |
| | | AAAGAACCTCGAG |
| 1128 | | Not Used |
| 1129 | Cas9 ORF | ATGGACAAGAAGTACTCTATCGGTTTGGACATCGGTACCAACTCTGTCGGTTGGGCCGTCATCACCGACGAA |
| | | TACAAGGTCCCATCTAAGAAGTTCAAGGTCTTGGGTAACACCGACAGACACTCTATCAAGAAGAACTTGATC |
| | | GGTGCCTTGTTGTTCGACTCTGGTGAAACCGCCGAAGCCACCAGATTGAAGAGAACCGCCAGAAGAAGATA |
| | | CACCAGAAGAAAGAACAGAATCTGCTACTTGCAAGAAATCTTCTCTAACGAAATGGCCAAGGTCGACGACT |
| | | CTTTCTTCCACAGATTGGAAGAATCTTTCTTGGTCGAAGAAGACAAGAAGCACGAAAGACACCCAATCTTCG |
| | | GTAACATCGTCGACGAAGTCGCCTACCACGAAAAGTACCCAACCATCTACCACTTGAGAAAGAAGTTGGTC |
| | | GACTCTACCGACAAGGCCGACTTGAGATTGATCTACTTGGCCTTGGCCCACATGATCAAGTTCAGAGGTCAC |
| | | TTCTTGATCGAAGGTGACTTGAACCCAGACAACTCTGACGTCGACAAGTTGTTCATCCAATTGGTCCAAACC |
| | | TACAACCAATTGTTCGAAGAAAACCCAATCAACGCCTCTGGTGTCGACGCCAAGGCCATCTTGTCTGCCAGA |
| | | TTGTCTAAGAGCAGAAGATTGGAAAACTTGATCGCCCAATTGCCAGGTGAAAAGAAGAACGGTTTGTTCGGT |
| | | AACTTGATCGCCTTGTCTTTGGGTTTGACCCCAAACTTCAAGTCTAACTTCGACTTGGCCGAAGACGCCAAGT |
| | | TGCAATTGTCTAAGGACACCTACGACGACGACTTGGACAACTTGTTGGCCCAAATCGGTGACCAATACGCCG |
| | | ACTTGTTCTTGGCCGCCAAGAACTTGTCTGACGCCATCTTGTTGTCTGACATCTTGAGAGTCAACACCGAAAT |
| | | CACCAAGGCCCCATTGTCTGCCTCTATGATCAAGAGATACGACGAACACCACCAAGACTTGACCTTGTTGAA |
| | | GGCCTTGGTCAGACAACAATTGCCAGAAAAGTACAAGGAAATCTTCTTCGACCAATCTAAGAACGGTTACGC |
| | | CGGTTACATCGACGGTGGTGCCTCTCAAGAAGAATTCTACAAGTTCATCAAGCCAATCTTGGAAAAGATGGA |
| | | CGGTACCGAAGAATTGTTGGTCAAGTTGAACAGAGAAGACTTGTTGAGAAAGCAAAGAACCTTCGACAACG |
| | | GTTCTATCCCACACCAAATCCACTTGGGTGAATTGCACGCCATCTTGAGAAGACAAGAAGACTTCTACCCAT |
| | | TCTTGAAGGACAACAGAGAAAAGATCGAAAAGATCTTGACCTTCAGAATCCCATACTACGTCGGTCCATTGG |
| | | CCAGAGGTAACAGCAGATTCGCCTGGATGACCAGAAAGTCTGAAGAAACCATCACCCCATGGAACTTCGAA |
| | | GAAGTCGTCGACAAGGGTGCCTCTGCCCAATCTTTCATCGAAAGAATGACCAACTTCGACAAGAACTTGCCA |
| | | AACGAAAAGGTCTTGCCAAAGCACTCTTTGTTGTACGAATACTTCACCGTCTACAACGAATTGACCAAGGTC |
| | | AAGTACGTCACCGAAGGTATGAGAAAGCCAGCCTTCTTGTCTGGTGAACAAAAGAAGGCCATCGTCGACTT |
| | | GTTGTTCAAGACCAACAGAAAGGTCACCGTCAAGCAATTGAAGGAAGACTACTTCAAGAAGATCGAATGCT |
| | | TCGACTCTGTCGAAATCTCTGGTGTCGAAGACAGATTCAACGCCTCTTTGGGTACCTACCACGACTTGTTGAA |
| | | GATCATCAAGGACAAGGACTTCTTGGACAACGAAGAAAACGAAGACATCTTGGAAGACATCGTCTTGACCT |
| | | TGACCTTGTTCGAAGACAGAGAAATGATCGAAGAAAGATTGAAGACCTACGCCCACTTGTTCGACGACAAG |
| | | GTCATGAAGCAATTGAAGAGAAGAAGATACACCGGTTGGGGTAGATTGAGCAGAAAGTTGATCAACGGTAT |
| | | CAGAGACAAGCAATCTGGTAAGACCATCTTGGACTTCTTGAAGTCTGACGGTTTCGCCAACAGAAACTTCAT |
| | | GCAATTGATCCACGACGACTCTTTGACCTTCAAGGAAGACATCCAAAAGGCCCAAGTCTCTGGTCAAGGTGA |
| | | CTCTTTGCACGAACACATCGCCAACTTGGCCGGTTCTCCAGCCATCAAGAAGGGTATCTTGCAAACCGTCAA |
| | | GGTCGTCGACGAATTGGTCAAGGTCATGGGTAGACACAAGCCAGAAAACATCGTCATCGAAATGGCCAGAG |
| | | AAAACCAAACCACCCAAAAGGGTCAAAAGAACAGCAGAGAAAGAATGAAGAGAATCGAAGAAGGTATCAA |
| | | GGAATTGGGTTCTCAAATCTTGAAGGAACACCCAGTCGAAAACACCCAATTGCAAAACGAAAAGTTGTACTT |
| | | GTACTACTTGCAAAACGGTAGAGACATGTACGTCGACCAAGAATTGGACATCAACAGATTGTCTGACTACGA |
| | | CGTCGACCACATCGTCCCACAATCTTTCTTGAAGGACGACTCTATCGACAACAAGGTCTTGACCAGATCTGA |
| | | CAAGAACAGAGGTAAGTCTGACAACGTCCCATCTGAAGAAGTCGTCAAGAAGATGAAGAACTACTGGAGAC |
| | | AATTGTTGAACGCCAAGTTGATCACCCAAAGAAAGTTCGACAACTTGACCAAGGCCGAAAGAGGTGGTTTG |
| | | TCTGAATTGGACAAGGCCGGTTTCATCAAGAGACAATTGGTCGAAACCAGACAAATCACCAAGCACGTCGC |
| | | CCAAATCTTGGACAGCAGAATGAACACCAAGTACGACGAAAACGACAAGTTGATCAGAGAAGTCAAGGTCA |
| | | TCACCTTGAAGTCTAAGTTGGTCTCTGACTTCAGAAAGGACTTCCAATTCTACAAGGTCAGAGAAATCAACA |
| | | ACTACCACCACGCCCACGACGCCTACTTGAACGCCGTCGTCGGTACCGCCTTGATCAAGAAGTACCCAAAGT |
| | | TGGAATCTGAATTCGTCTACGGTGACTACAAGGTCTACGACGTCAGAAAGATGATCGCCAAGTCTGAACAAG |
| | | AAATCGGTAAGGCCACCGCCAAGTACTTCTTCTACTCTAACATCATGAACTTCTTCAAGACCGAAATCACCTT |
| | | GGCCAACGGTGAAATCAGAAAGAGACCATTGATCGAAACCAACGGTGAAACCGGTGAAATCGTCTGGGACA |
| | | AGGGTAGAGACTTCGCCACCGTCAGAAAGGTCTTGTCTATGCCACAAGTCAACATCGTCAAGAAGACCGAA |
| | | GTCCAAACCGGTGGTTTCTCTAAGGAATCTATCTTGCCAAAGAGAAACTCTGACAAGTTGATCGCCAGAAAG |
| | | AAGGACTGGGACCCAAAGAAGTACGGTGGTTTCGACTCTCCAACCGTCGCCTACTCTGTCTTGGTCGTCGCC |
| | | AAGGTCGAAAAGGGTAAGTCTAAGAAGTTGAAGTCTGTCAAGGAATTGTTGGGTATCACCATCATGGAAAG |
| | | ATCTTCTTTCGAAAAGAACCCAATCGACTTCTTGGAAGCCAAGGGTTACAAGGAAGTCAAGAAGGACTTGAT |
| | | CATCAAGTTGCCAAAGTACTCTTTGTTCGAATTGGAAAACGGTAGAAAGAGAATGTTGGCCTCTGCCGGTGA |
| | | ATTGCAAAAGGGTAACGAATTGGCCTTGCCATCTAAGTACGTCAACTTCTTGTACTTGGCCTCTCACTACGAA |
| | | AAGTTGAAGGGTTCTCCAGAAGACAACGAACAAAAGCAATTGTTCGTCGAACAACACAAGCACTACTTGGA |
| | | CGAAATCATCGAACAAATCTCTGAATTCTCTAAGAGAGTCATCTTGGCCGACGCCAACTTGGACAAGGTCTT |
| | | GTCTGCCTACAACAAGCACAGAGACAAGCCAATCAGAGAACAAGCCGAAAACATCATCCACTTGTTCACCT |
| | | TGACCAACTTGGGTGCCCCAGCCGCCTTCAAGTACTTCGACACCACCATCGACAGAAAGAGATACACCTCTA |
| | | CCAAGGAAGTCTTGGACGCCACCTTGATCCACCAATCTATCACCGGTTTGTACGAAACCAGAATCGACTTGT |
| | | CTCAATTGGGTGGTGACGGTGGTGGTTCTCCAAAGAAGAAGAGAAAGGTCTAA |
| 1130 | Cas9 ORF | ATGGACAAGAAGTACTCCATCGGCCTGGACATCGGCACCAACTCCGTGGGCTGGGCCGTGATCACCGACGA |
| | | GTACAAGGTGCCCTCCAAGAAGTTCAAGGTGCTGGGCAACACCGACCGGCACTCCATCAAGAAGAACCTGA |
| | | TCGGCGCCCTGCTGTTCGACTCCGGCGAGACCGCCGAGGCCACCCGGCTGAAGCGGACCGCCCGGCGGCGG |
| | | TACACCCGGCGGAAGAACCGGATCTGCTACCTGCAGGAGATCTTCTCCAACGAGATGGCCAAGGTGGACGA |
| | | CTCCTTCTTCCACCGGCTGGAGGAGTCCTTCCTGGTGGAGGAGGACAAGAAGCACGAGCGGCACCCCATCTT |
| | | CGGCAACATCGTGGACGAGGTGGCCTACCACGAGAAGTACCCCACCATCTACCACCTGCGGAAGAAGCTGG |
| | | TGGACTCCACCGACAAGGCCGACCTGCGGCTGATCTACCTGGCCCTGGCCCACATGATCAAGTTCCGGGGCC |
| | | ACTTCCTGATCGAGGGCGACCTGAACCCCGACAACTCCGACGTGGACAAGCTGTTCATCCAGCTGGTGCAGA |
| | | CCTACAACCAGCTGTTCGAGGAGAACCCCATCAACGCCTCCGGCGTGGACGCCAAGGCCATCCTGTCCGCCC |
| | | GGCTGTCCAAGTCCCGGCGGCTGGAGAACCTGATCGCCCAGCTGCCCGGCGAGAAGAAGAACGGCCTGTTC |
| | | GGCAACCTGATCGCCCTGTCCCTGGGCCTGACCCCCAACTTCAAGTCCAACTTCGACCTGGCCGAGGACGCC |
| | | AAGCTGCAGCTGTCCAAGGACACCTACGACGACGACCTGGACAACCTGCTGGCCCAGATCGGCGACCAGTA |
| | | CGCCGACCTGTTCCTGGCCGCCAAGAACCTGTCCGACGCCATCCTGCTGTCCGACATCCTGCGGGTGAACAC |
| | | CGAGATCACCAAGGCCCCCCTGTCCGCCTCCATGATCAAGCGGTACGACGAGCACCACCAGGACCTGACCCT |
| | | GCTGAAGGCCCTGGTGCGGCAGCAGCTGCCCGAGAAGTACAAGGAGATCTTCTTCGACCAGTCCAAGAACG |
| | | GCTACGCCGGCTACATCGACGGCGGCGCCTCCCAGGAGGAGTTCTACAAGTTCATCAAGCCCATCCTGGAGA |
| | | AGATGGACGGCACCGAGGAGCTGCTGGTGAAGCTGAACCGGGAGGACCTGCTGCGGAAGCAGCGGACCTTC |
| | | GACAACGGCTCCATCCCCCACCAGATCCACCTGGGCGAGCTGCACGCCATCCTGCGGCGGCAGGAGGACTT |
| | | CTACCCCTTCCTGAAGGACAACCGGGAGAAGATCGAGAAGATCCTGACCTTCCGGATCCCCTACTACGTGGG |
| | | CCCCCTGGCCCGGGGCAACTCCCGGTTCGCCTGGATGACCCGGAAGTCCGAGGAGACCATCACCCCCTGGA |
| | | ACTTCGAGGAGGTGGTGGACAAGGGCGCCTCCGCCCAGTCCTTCATCGAGCGGATGACCAACTTCGACAAG |
| | | AACCTGCCCAACGAGAAGGTGCTGCCCAAGCACTCCCTGCTGTACGAGTACTTCACCGTGTACAACGAGCTG |
| | | ACCAAGGTGAAGTACGTGACCGAGGGCATGCGGAAGCCCGCCTTCCTGTCCGGCGAGCAGAAGAAGGCCAT |
| | | CGTGGACCTGCTGTTCAAGACCAACCGGAAGGTGACCGTGAAGCAGCTGAAGGAGGACTACTTCAAGAAGA |
| | | TCGAGTGCTTCGACTCCGTGGAGATCTCCGGCGTGGAGGACCGGTTCAACGCCTCCCTGGGCACCTACCACG |
| | | ACCTGCTGAAGATCATCAAGGACAAGGACTTCCTGGACAACGAGGAGAACGAGGACATCCTGGAGGACATC |
| | | GTGCTGACCCTGACCCTGTTCGAGGACCGGGAGATGATCGAGGAGCGGCTGAAGACCTACGCCCACCTGTTC |
| | | GACGACAAGGTGATGAAGCAGCTGAAGCGGCGGCGGTACACCGGCTGGGGCCGGCTGTCCCGGAAGCTGAT |
| | | CAACGGCATCCGGGACAAGCAGTCCGGCAAGACCATCCTGGACTTCCTGAAGTCCGACGGCTTCGCCAACC |
| | | GGAACTTCATGCAGCTGATCCACGACGACTCCCTGACCTTCAAGGAGGACATCCAGAAGGCCCAGGTGTCC |
| | | GGCCAGGGCGACTCCCTGCACGAGCACATCGCCAACCTGGCCGGCTCCCCCGCCATCAAGAAGGGCATCCT |
| | | GCAGACCGTGAAGGTGGTGGACGAGCTGGTGAAGGTGATGGGCCGGCACAAGCCCGAGAACATCGTGATCG |
| | | AGATGGCCCGGGAGAACCAGACCACCCAGAAGGGCCAGAAGAACTCCCGGGAGCGGATGAAGCGGATCGA |
| | | GGAGGGCATCAAGGAGCTGGGCTCCCAGATCCTGAAGGAGCACCCCGTGGAGAACACCCAGCTGCAGAACG |
| | | AGAAGCTGTACCTGTACTACCTGCAGAACGGCCGGGACATGTACGTGGACCAGGAGCTGGACATCAACCGG |
| | | CTGTCCGACTACGACGTGGACCACATCGTGCCCCAGTCCTTCCTGAAGGACGACTCCATCGACAACAAGGTG |
| | | CTGACCCGGTCCGACAAGAACCGGGGCAAGTCCGACAACGTGCCCTCCGAGGAGGTGGTGAAGAAGATGAA |
| | | GAACTACTGGCGGCAGCTGCTGAACGCCAAGCTGATCACCCAGCGGAAGTTCGACAACCTGACCAAGGCCG |
| | | AGCGGGGCGGCCTGTCCGAGCTGGACAAGGCCGGCTTCATCAAGCGGCAGCTGGTGGAGACCCGGCAGATC |
| | | ACCAAGCACGTGGCCCAGATCCTGGACTCCCGGATGAACACCAAGTACGACGAGAACGACAAGCTGATCCG |
| | | GGAGGTGAAGGTGATCACCCTGAAGTCCAAGCTGGTGTCCGACTTCCGGAAGGACTTCCAGTTCTACAAGGT |
| | | GCGGGAGATCAACAACTACCACCACGCCCACGACGCCTACCTGAACGCCGTGGTGGGCACCGCCCTGATCA |
| | | AGAAGTACCCCAAGCTGGAGTCCGAGTTCGTGTACGGCGACTACAAGGTGTACGACGTGCGGAAGATGATC |
| | | GCCAAGTCCGAGCAGGAGATCGGCAAGGCCACCGCCAAGTACTTCTTCTACTCCAACATCATGAACTTCTTC |
| | | AAGACCGAGATCACCCTGGCCAACGGCGAGATCCGGAAGCGGCCCCTGATCGAGACCAACGGCGAGACCG |
| | | GCGAGATCGTGTGGGACAAGGGCCGGGACTTCGCCACCGTGCGGAAGGTGCTGTCCATGCCCCAGGTGAAC |
| | | ATCGTGAAGAAGACCGAGGTGCAGACCGGCGGCTTCTCCAAGGAGTCCATCCTGCCCAAGCGGAACTCCGA |
| | | CAAGCTGATCGCCCGGAAGAAGGACTGGGACCCCAAGAAGTACGGCGGCTTCGACTCCCCCACCGTGGCCT |
| | | ACTCCGTGCTGGTGGTGGCCAAGGTGGAGAAGGGCAAGTCCAAGAAGCTGAAGTCCGTGAAGGAGCTGCTG |
| | | GGCATCACCATCATGGAGCGGTCCTCCTTCGAGAAGAACCCCATCGACTTCCTGGAGGCCAAGGGCTACAA |
| | | GGAGGTGAAGAAGGACCTGATCATCAAGCTGCCCAAGTACTCCCTGTTCGAGCTGGAGAACGGCCGGAAGC |
| | | GGATGCTGGCCTCCGCCGGCGAGCTGCAGAAGGGCAACGAGCTGGCCCTGCCCTCCAAGTACGTGAACTTC |
| | | CTGTACCTGGCCTCCCACTACGAGAAGCTGAAGGGCTCCCCCGAGGACAACGAGCAGAAGCAGCTGTTCGT |
| | | GGAGCAGCACAAGCACTACCTGGACGAGATCATCGAGCAGATCTCCGAGTTCTCCAAGCGGGTGATCCTGG |
| | | CCGACGCCAACCTGGACAAGGTGCTGTCCGCCTACAACAAGCACCGGGACAAGCCCATCCGGGAGCAGGCC |
| | | GAGAACATCATCCACCTGTTCACCCTGACCAACCTGGGCGCCCCCGCCGCCTTCAAGTACTTCGACACCACC |
| | | ATCGACCGGAAGCGGTACACCTCCACCAAGGAGGTGCTGGACGCCACCCTGATCCACCAGTCCATCACCGG |
| | | CCTGTACGAGACCCGGATCGACCTGTCCCAGCTGGGCGGCGACGGCGGCGGCTCCCCCAAGAAGAAGCGGA |
| | | AGGTGTGA |
| 1131 | Cas9 ORF | ATGGACAAGAAGTACAGCATCGGCCTGGACATCGGCACCAACAGCGTGGGCTGGGCCGTGATCACCGACGA |
| | | GTACAAGGTGCCCAGCAAGAAGTTCAAGGTGCTGGGCAACACCGACCGGCACAGCATCAAGAAGAACCTGA |
| | | TCGGCGCCCTGCTGTTCGACAGCGGCGAGACCGCCGAGGCCACCCGGCTGAAGCGGACCGCCCGGCGGCGG |
| | | TACACCCGGCGGAAGAACCGGATCTGCTACCTGCAGGAGATCTTCAGCAACGAGATGGCCAAGGTGGACGA |
| | | CAGCTTCTTCCACCGGCTGGAGGAGAGCTTCCTGGTGGAGGAGGACAAGAAGCACGAGCGGCACCCCATCT |
| | | TCGGCAACATCGTGGACGAGGTGGCCTACCACGAGAAGTACCCCACCATCTACCACCTGCGGAAGAAGCTG |
| | | GTGGACAGCACCGACAAGGCCGACCTGCGGCTGATCTACCTGGCCCTGGCCCACATGATCAAGTTCCGGGG |
| | | CCACTTCCTGATCGAGGGCGACCTGAACCCCGACAACAGCGACGTGGACAAGCTGTTCATCCAGCTGGTGCA |
| | | GACCTACAACCAGCTGTTCGAGGAGAACCCCATCAACGCCAGCGGCGTGGACGCCAAGGCCATCCTGAGCG |
| | | CCCGGCTGAGCAAGAGCCGGCGGCTGGAGAACCTGATCGCCCAGCTGCCCGGCGAGAAGAAGAACGGCCTG |
| | | TTCGGCAACCTGATCGCCCTGAGCCTGGGCCTGACCCCCAACTTCAAGAGCAACTTCGACCTGGCCGAGGAC |
| | | GCCAAGCTGCAGCTGAGCAAGGACACCTACGACGACGACCTGGACAACCTGCTGGCCCAGATCGGCGACCA |
| | | GTACGCCGACCTGTTCCTGGCCGCCAAGAACCTGAGCGACGCCATCCTGCTGAGCGACATCCTGCGGGTGAA |
| | | CACCGAGATCACCAAGGCCCCCCTGAGCGCCAGCATGATCAAGCGGTACGACGAGCACCACCAGGACCTGA |
| | | CCCTGCTGAAGGCCCTGGTGCGGCAGCAGCTGCCCGAGAAGTACAAGGAGATCTTCTTCGACCAGAGCAAG |
| | | AACGGCTACGCCGGCTACATCGACGGCGGCGCCAGCCAGGAGGAGTTCTACAAGTTCATCAAGCCCATCCT |
| | | GGAGAAGATGGACGGCACCGAGGAGCTGCTGGTGAAGCTGAACCGGGAGGACCTGCTGCGGAAGCAGCGG |
| | | ACCTTCGACAACGGCAGCATCCCCCACCAGATCCACCTGGGCGAGCTGCACGCCATCCTGCGGCGGCAGGA |
| | | GGACTTCTACCCCTTCCTGAAGGACAACCGGGAGAAGATCGAGAAGATCCTGACCTTCCGGATCCCCTACTA |
| | | CGTGGGCCCCCTGGCCCGGGGCAACAGCCGGTTCGCCTGGATGACCCGGAAGAGCGAGGAGACCATCACCC |
| | | CCTGGAACTTCGAGGAGGTGGTGGACAAGGGCGCCAGCGCCCAGAGCTTCATCGAGCGGATGACCAACTTC |
| | | GACAAGAACCTGCCCAACGAGAAGGTGCTGCCCAAGCACAGCCTGCTGTACGAGTACTTCACCGTGTACAA |
| | | CGAGCTGACCAAGGTGAAGTACGTGACCGAGGGCATGCGGAAGCCCGCCTTCCTGAGCGGCGAGCAGAAGA |
| | | AGGCCATCGTGGACCTGCTGTTCAAGACCAACCGGAAGGTGACCGTGAAGCAGCTGAAGGAGGACTACTTC |
| | | AAGAAGATCGAGTGCTTCGACAGCGTGGAGATCAGCGGCGTGGAGGACCGGTTCAACGCCAGCCTGGGCAC |
| | | CTACCACGACCTGCTGAAGATCATCAAGGACAAGGACTTCCTGGACAACGAGGAGAACGAGGACATCCTGG |
| | | AGGACATCGTGCTGACCCTGACCCTGTTCGAGGACCGGGAGATGATCGAGGAGCGGCTGAAGACCTACGCC |
| | | CACCTGTTCGACGACAAGGTGATGAAGCAGCTGAAGCGGCGGCGGTACACCGGCTGGGGCCGGCTGAGCCG |
| | | GAAGCTGATCAACGGCATCCGGGACAAGCAGAGCGGCAAGACCATCCTGGACTTCCTGAAGAGCGACGGCT |
| | | TCGCCAACCGGAACTTCATGCAGCTGATCCACGACGACAGCCTGACCTTCAAGGAGGACATCCAGAAGGCC |
| | | CAGGTGAGCGGCCAGGGCGACAGCCTGCACGAGCACATCGCCAACCTGGCCGGCAGCCCCGCCATCAAGAA |
| | | GGGCATCCTGCAGACCGTGAAGGTGGTGGACGAGCTGGTGAAGGTGATGGGCCGGCACAAGCCCGAGAACA |
| | | TCGTGATCGAGATGGCCCGGGAGAACCAGACCACCCAGAAGGGCCAGAAGAACAGCCGGGAGCGGATGAA |
| | | GCGGATCGAGGAGGGCATCAAGGAGCTGGGCAGCCAGATCCTGAAGGAGCACCCCGTGGAGAACACCCAG |
| | | CTGCAGAACGAGAAGCTGTACCTGTACTACCTGCAGAACGGCCGGGACATGTACGTGGACCAGGAGCTGGA |
| | | CATCAACCGGCTGAGCGACTACGACGTGGACCACATCGTGCCCCAGAGCTTCCTGAAGGACGACAGCATCG |
| | | ACAACAAGGTGCTGACCCGGAGCGACAAGAACCGGGGCAAGAGCGACAACGTGCCCAGCGAGGAGGTGGT |
| | | GAAGAAGATGAAGAACTACTGGCGGCAGCTGCTGAACGCCAAGCTGATCACCCAGCGGAAGTTCGACAACC |
| | | TGACCAAGGCCGAGCGGGGCGGCCTGAGCGAGCTGGACAAGGCCGGCTTCATCAAGCGGCAGCTGGTGGAG |
| | | ACCCGGCAGATCACCAAGCACGTGGCCCAGATCCTGGACAGCCGGATGAACACCAAGTACGACGAGAACGA |
| | | CAAGCTGATCCGGGAGGTGAAGGTGATCACCCTGAAGAGCAAGCTGGTGAGCGACTTCCGGAAGGACTTCC |
| | | AGTTCTACAAGGTGCGGGAGATCAACAACTACCACCACGCCCACGACGCCTACCTGAACGCCGTGGTGGGC |
| | | ACCGCCCTGATCAAGAAGTACCCCAAGCTGGAGAGCGAGTTCGTGTACGGCGACTACAAGGTGTACGACGT |
| | | GCGGAAGATGATCGCCAAGAGCGAGCAGGAGATCGGCAAGGCCACCGCCAAGTACTTCTTCTACAGCAACA |
| | | TCATGAACTTCTTCAAGACCGAGATCACCCTGGCCAACGGCGAGATCCGGAAGCGGCCCCTGATCGAGACC |
| | | AACGGCGAGACCGGCGAGATCGTGTGGGACAAGGGCCGGGACTTCGCCACCGTGCGGAAGGTGCTGAGCAT |
| | | GCCCCAGGTGAACATCGTGAAGAAGACCGAGGTGCAGACCGGCGGCTTCAGCAAGGAGAGCATCCTGCCCA |
| | | AGCGGAACAGCGACAAGCTGATCGCCCGGAAGAAGGACTGGGACCCCAAGAAGTACGGCGGCTTCGACAG |
| | | CCCCACCGTGGCCTACAGCGTGCTGGTGGTGGCCAAGGTGGAGAAGGGCAAGAGCAAGAAGCTGAAGAGC |
| | | GTGAAGGAGCTGCTGGGCATCACCATCATGGAGCGGAGCAGCTTCGAGAAGAACCCCATCGACTTCCTGGA |
| | | GGCCAAGGGCTACAAGGAGGTGAAGAAGGACCTGATCATCAAGCTGCCCAAGTACAGCCTGTTCGAGCTGG |
| | | AGAACGGCCGGAAGCGGATGCTGGCCAGCGCCGGCGAGCTGCAGAAGGGCAACGAGCTGGCCCTGCCCAG |
| | | CAAGTACGTGAACTTCCTGTACCTGGCCAGCCACTACGAGAAGCTGAAGGGCAGCCCCGAGGACAACGAGC |
| | | AGAAGCAGCTGTTCGTGGAGCAGCACAAGCACTACCTGGACGAGATCATCGAGCAGATCAGCGAGTTCAGC |
| | | AAGCGGGTGATCCTGGCCGACGCCAACCTGGACAAGGTGCTGAGCGCCTACAACAAGCACCGGGACAAGCC |
| | | CATCCGGGAGCAGGCCGAGAACATCATCCACCTGTTCACCCTGACCAACCTGGGCGCCCCCGCCGCCTTCAA |
| | | GTACTTCGACACCACCATCGACCGGAAGCGGTACACCAGCACCAAGGAGGTGCTGGACGCCACCCTGATCC |
| | | ACCAGAGCATCACCGGCCTGTACGAGACCCGGATCGACCTGAGCCAGCTGGGCGGCGACGGCGGCGGCAGC |
| | | CCCAAGAAGAAGCGGAAGGTGTGA |
| 1132 | Cas9 ORF | ATGGACAAGAAGTACTCCATCGGCCTGGACATCGGCACCAACTCCGTGGGCTGGGCCGTGATCACCGACGA |
| | | GTACAAGGTGCCCTCCAAGAAGTTCAAGGTGCTGGGCAACACCGACCGGCACTCCATCAAGAAGAACCTGA |
| | | TCGGCGCCCTGCTGTTCGACTCCGGCGAGACCGCCGAGGCCACCCGGCTGAAGCGGACCGCCCGGCGGCGG |
| | | TACACCCGGCGGAAGAACCGGATCTGCTACCTGCAGGAGATCTTCTCCAACGAGATGGCCAAGGTGGACGA |
| | | CTCCTTCTTCCACCGGCTGGAGGAGTCCTTCCTGGTGGAGGAGGACAAGAAGCACGAGCGGCACCCCATCTT |
| | | CGGCAACATCGTGGACGAGGTGGCCTACCACGAGAAGTACCCCACCATCTACCACCTGCGGAAGAAGCTGG |
| | | TGGACTCCACCGACAAGGCCGACCTGCGGCTGATCTACCTGGCCCTGGCCCACATGATCAAGTTCCGGGGCC |
| | | ACTTCCTGATCGAGGGCGACCTGAACCCCGACAACTCCGACGTGGACAAGCTGTTCATCCAGCTGGTGCAGA |
| | | CCTACAACCAGCTGTTCGAGGAGAACCCCATCAACGCCTCCGGCGTGGACGCCAAGGCCATCCTGTCCGCCC |
| | | GGCTGTCCAAGTCCCGGCGGCTGGAGAACCTGATCGCCCAGCTGCCCGGCGAGAAGAAGAACGGCCTGTTC |
| | | GGCAACCTGATCGCCCTGTCCCTGGGCCTGACCCCCAACTTCAAGTCCAACTTCGACCTGGCCGAGGACGCC |
| | | AAGCTGCAGCTGTCCAAGGACACCTACGACGACGACCTGGACAACCTGCTGGCCCAGATCGGCGACCAGTA |
| | | CGCCGACCTGTTCCTGGCCGCCAAGAACCTGTCCGACGCCATCCTGCTGTCCGACATCCTGCGGGTGAACAC |
| | | CGAGATCACCAAGGCCCCCCTGTCCGCCTCCATGATCAAGCGGTACGACGAGCACCACCAGGACCTGACCCT |
| | | GCTGAAGGCCCTGGTGCGGCAGCAGCTGCCCGAGAAGTACAAGGAGATCTTCTTCGACCAGTCCAAGAACG |
| | | GCTACGCCGGCTACATCGACGGCGGCGCCTCCCAGGAGGAGTTCTACAAGTTCATCAAGCCCATCCTGGAGA |
| | | AGATGGACGGCACCGAGGAGCTGCTGGTGAAGCTGAACCGGGAGGACCTGCTGCGGAAGCAGCGGACCTTC |
| | | GACAACGGCTCCATCCCCCACCAGATCCACCTGGGCGAGCTGCACGCCATCCTGCGGCGGCAGGAGGACTT |
| | | CTACCCCTTCCTGAAGGACAACCGGGAGAAGATCGAGAAGATCCTGACCTTCCGGATCCCCTACTACGTGGG |
| | | CCCCCTGGCCCGGGGCAACTCCCGGTTCGCCTGGATGACCCGGAAGTCCGAGGAGACCATCACCCCCTGGA |
| | | ACTTCGAGGAGGTGGTGGACAAGGGCGCCTCCGCCCAGTCCTTCATCGAGCGGATGACCAACTTCGACAAG |
| | | AACCTGCCCAACGAGAAGGTGCTGCCCAAGCACTCCCTGCTGTACGAGTACTTCACCGTGTACAACGAGCTG |
| | | ACCAAGGTGAAGTACGTGACCGAGGGCATGCGGAAGCCCGCCTTCCTGTCCGGCGAGCAGAAGAAGGCCAT |
| | | CGTGGACCTGCTGTTCAAGACCAACCGGAAGGTGACCGTGAAGCAGCTGAAGGAGGACTACTTCAAGAAGA |
| | | TCGAGTGCTTCGACTCCGTGGAGATCTCCGGCGTGGAGGACCGGTTCAACGCCTCCCTGGGCACCTACCACG |
| | | ACCTGCTGAAGATCATCAAGGACAAGGACTTCCTGGACAACGAGGAGAACGAGGACATCCTGGAGGACATC |
| | | GTGCTGACCCTGACCCTGTTCGAGGACCGGGAGATGATCGAGGAGCGGCTGAAGACCTACGCCCACCTGTTC |
| | | GACGACAAGGTGATGAAGCAGCTGAAGCGGCGGCGGTACACCGGCTGGGGCCGGCTGTCCCGGAAGCTGAT |
| | | CAACGGCATCCGGGACAAGCAGTCCGGCAAGACCATCCTGGACTTCCTGAAGTCCGACGGCTTCGCCAACC |
| | | GGAACTTCATGCAGCTGATCCACGACGACTCCCTGACCTTCAAGGAGGACATCCAGAAGGCCCAGGTGTCC |
| | | GGCCAGGGCGACTCCCTGCACGAGCACATCGCCAACCTGGCCGGCTCCCCCGCCATCAAGAAGGGCATCCT |
| | | GCAGACCGTGAAGGTGGTGGACGAGCTGGTGAAGGTGATGGGCCGGCACAAGCCCGAGAACATCGTGATCG |
| | | AGATGGCCCGGGAGAACCAGACCACCCAGAAGGGCCAGAAGAACTCCCGGGAGCGGATGAAGCGGATCGA |
| | | GGAGGGCATCAAGGAGCTGGGCTCCCAGATCCTGAAGGAGCACCCCGTGGAGAACACCCAGCTGCAGAACG |
| | | AGAAGCTGTACCTGTACTACCTGCAGAACGGCCGGGACATGTACGTGGACCAGGAGCTGGACATCAACCGG |
| | | CTGTCCGACTACGACGTGGACCACATCGTGCCCCAGTCCTTCCTGAAGGACGACTCCATCGACAACAAGGTG |
| | | CTGACCCGGTCCGACAAGAACCGGGGCAAGTCCGACAACGTGCCCTCCGAGGAGGTGGTGAAGAAGATGAA |
| | | GAACTACTGGCGGCAGCTGCTGAACGCCAAGCTGATCACCCAGCGGAAGTTCGACAACCTGACCAAGGCCG |
| | | AGCGGGGCGGCCTGTCCGAGCTGGACAAGGCCGGCTTCATCAAGCGGCAGCTGGTGGAGACCCGGCAGATC |
| | | ACCAAGCACGTGGCCCAGATCCTGGACTCCCGGATGAACACCAAGTACGACGAGAACGACAAGCTGATCCG |
| | | GGAGGTGAAGGTGATCACCCTGAAGTCCAAGCTGGTGTCCGACTTCCGGAAGGACTTCCAGTTCTACAAGGT |
| | | GCGGGAGATCAACAACTACCACCACGCCCACGACGCCTACCTGAACGCCGTGGTGGGCACCGCCCTGATCA |
| | | AGAAGTACCCCAAGCTGGAGTCCGAGTTCGTGTACGGCGACTACAAGGTGTACGACGTGCGGAAGATGATC |
| | | GCCAAGTCCGAGCAGGAGATCGGCAAGGCCACCGCCAAGTACTTCTTCTACTCCAACATCATGAACTTCTTC |
| | | AAGACCGAGATCACCCTGGCCAACGGCGAGATCCGGAAGCGGCCCCTGATCGAGACCAACGGCGAGACCG |
| | | GCGAGATCGTGTGGGACAAGGGCCGGGACTTCGCCACCGTGCGGAAGGTGCTGTCCATGCCCCAGGTGAAC |
| | | ATCGTGAAGAAGACCGAGGTGCAGACCGGCGGCTTCTCCAAGGAGTCCATCCTGCCCAAGCGGAACTCCGA |
| | | CAAGCTGATCGCCCGGAAGAAGGACTGGGACCCCAAGAAGTACGGCGGCTTCGACTCCCCCACCGTGGCCT |
| | | ACTCCGTGCTGGTGGTGGCCAAGGTGGAGAAGGGCAAGTCCAAGAAGCTGAAGTCCGTGAAGGAGCTGCTG |
| | | GGCATCACCATCATGGAGCGGTCCTCCTTCGAGAAGAACCCCATCGACTTCCTGGAGGCCAAGGGCTACAA |
| | | GGAGGTGAAGAAGGACCTGATCATCAAGCTGCCCAAGTACTCCCTGTTCGAGCTGGAGAACGGCCGGAAGC |
| | | GGATGCTGGCCTCCGCCGGCGAGCTGCAGAAGGGCAACGAGCTGGCCCTGCCCTCCAAGTACGTGAACTTC |
| | | CTGTACCTGGCCTCCCACTACGAGAAGCTGAAGGGCTCCCCCGAGGACAACGAGCAGAAGCAGCTGTTCGT |
| | | GGAGCAGCACAAGCACTACCTGGACGAGATCATCGAGCAGATCTCCGAGTTCTCCAAGCGGGTGATCCTGG |
| | | CCGACGCCAACCTGGACAAGGTGCTGTCCGCCTACAACAAGCACCGGGACAAGCCCATCCGGGAGCAGGCC |
| | | GAGAACATCATCCACCTGTTCACCCTGACCAACCTGGGCGCCCCCGCCGCCTTCAAGTACTTCGACACCACC |
| | | ATCGACCGGAAGCGGTACACCTCCACCAAGGAGGTGCTGGACGCCACCCTGATCCACCAGTCCATCACCGG |
| | | CCTGTACGAGACCCGGATCGACCTGTCCCAGCTGGGCGGCGACGGCTCCGGCTCCCCCAAGAAGAAGCGGA |
| | | AGGTGGACGGCTCCCCCAAGAAGAAGCGGAAGGTGGACTCCGGCTGA |
| 1133 | Cas9 nickase | ATGGACAAGAAGTACTCCATCGGCCTGGCCATCGGCACCAACTCCGTGGGCTGGGCCGTGATCACCGACGA |
| | ORF | GTACAAGGTGCCCTCCAAGAAGTTCAAGGTGCTGGGCAACACCGACCGGCACTCCATCAAGAAGAACCTGA |
| | | TCGGCGCCCTGCTGTTCGACTCCGGCGAGACCGCCGAGGCCACCCGGCTGAAGCGGACCGCCCGGCGGCGG |
| | | TACACCCGGCGGAAGAACCGGATCTGCTACCTGCAGGAGATCTTCTCCAACGAGATGGCCAAGGTGGACGA |
| | | CTCCTTCTTCCACCGGCTGGAGGAGTCCTTCCTGGTGGAGGAGGACAAGAAGCACGAGCGGCACCCCATCTT |
| | | CGGCAACATCGTGGACGAGGTGGCCTACCACGAGAAGTACCCCACCATCTACCACCTGCGGAAGAAGCTGG |
| | | TGGACTCCACCGACAAGGCCGACCTGCGGCTGATCTACCTGGCCCTGGCCCACATGATCAAGTTCCGGGGCC |
| | | ACTTCCTGATCGAGGGCGACCTGAACCCCGACAACTCCGACGTGGACAAGCTGTTCATCCAGCTGGTGCAGA |
| | | CCTACAACCAGCTGTTCGAGGAGAACCCCATCAACGCCTCCGGCGTGGACGCCAAGGCCATCCTGTCCGCCC |
| | | GGCTGTCCAAGTCCCGGCGGCTGGAGAACCTGATCGCCCAGCTGCCCGGCGAGAAGAAGAACGGCCTGTTC |
| | | GGCAACCTGATCGCCCTGTCCCTGGGCCTGACCCCCAACTTCAAGTCCAACTTCGACCTGGCCGAGGACGCC |
| | | AAGCTGCAGCTGTCCAAGGACACCTACGACGACGACCTGGACAACCTGCTGGCCCAGATCGGCGACCAGTA |
| | | CGCCGACCTGTTCCTGGCCGCCAAGAACCTGTCCGACGCCATCCTGCTGTCCGACATCCTGCGGGTGAACAC |
| | | CGAGATCACCAAGGCCCCCCTGTCCGCCTCCATGATCAAGCGGTACGACGAGCACCACCAGGACCTGACCCT |
| | | GCTGAAGGCCCTGGTGCGGCAGCAGCTGCCCGAGAAGTACAAGGAGATCTTCTTCGACCAGTCCAAGAACG |
| | | GCTACGCCGGCTACATCGACGGCGGCGCCTCCCAGGAGGAGTTCTACAAGTTCATCAAGCCCATCCTGGAGA |
| | | AGATGGACGGCACCGAGGAGCTGCTGGTGAAGCTGAACCGGGAGGACCTGCTGCGGAAGCAGCGGACCTTC |
| | | GACAACGGCTCCATCCCCCACCAGATCCACCTGGGCGAGCTGCACGCCATCCTGCGGCGGCAGGAGGACTT |
| | | CTACCCCTTCCTGAAGGACAACCGGGAGAAGATCGAGAAGATCCTGACCTTCCGGATCCCCTACTACGTGGG |
| | | CCCCCTGGCCCGGGGCAACTCCCGGTTCGCCTGGATGACCCGGAAGTCCGAGGAGACCATCACCCCCTGGA |
| | | ACTTCGAGGAGGTGGTGGACAAGGGCGCCTCCGCCCAGTCCTTCATCGAGCGGATGACCAACTTCGACAAG |
| | | AACCTGCCCAACGAGAAGGTGCTGCCCAAGCACTCCCTGCTGTACGAGTACTTCACCGTGTACAACGAGCTG |
| | | ACCAAGGTGAAGTACGTGACCGAGGGCATGCGGAAGCCCGCCTTCCTGTCCGGCGAGCAGAAGAAGGCCAT |
| | | CGTGGACCTGCTGTTCAAGACCAACCGGAAGGTGACCGTGAAGCAGCTGAAGGAGGACTACTTCAAGAAGA |
| | | TCGAGTGCTTCGACTCCGTGGAGATCTCCGGCGTGGAGGACCGGTTCAACGCCTCCCTGGGCACCTACCACG |
| | | ACCTGCTGAAGATCATCAAGGACAAGGACTTCCTGGACAACGAGGAGAACGAGGACATCCTGGAGGACATC |
| | | GTGCTGACCCTGACCCTGTTCGAGGACCGGGAGATGATCGAGGAGCGGCTGAAGACCTACGCCCACCTGTTC |
| | | GACGACAAGGTGATGAAGCAGCTGAAGCGGCGGCGGTACACCGGCTGGGGCCGGCTGTCCCGGAAGCTGAT |
| | | CAACGGCATCCGGGACAAGCAGTCCGGCAAGACCATCCTGGACTTCCTGAAGTCCGACGGCTTCGCCAACC |
| | | GGAACTTCATGCAGCTGATCCACGACGACTCCCTGACCTTCAAGGAGGACATCCAGAAGGCCCAGGTGTCC |
| | | GGCCAGGGCGACTCCCTGCACGAGCACATCGCCAACCTGGCCGGCTCCCCCGCCATCAAGAAGGGCATCCT |
| | | GCAGACCGTGAAGGTGGTGGACGAGCTGGTGAAGGTGATGGGCCGGCACAAGCCCGAGAACATCGTGATCG |
| | | AGATGGCCCGGGAGAACCAGACCACCCAGAAGGGCCAGAAGAACTCCCGGGAGCGGATGAAGCGGATCGA |
| | | GGAGGGCATCAAGGAGCTGGGCTCCCAGATCCTGAAGGAGCACCCCGTGGAGAACACCCAGCTGCAGAACG |
| | | AGAAGCTGTACCTGTACTACCTGCAGAACGGCCGGGACATGTACGTGGACCAGGAGCTGGACATCAACCGG |
| | | CTGTCCGACTACGACGTGGACCACATCGTGCCCCAGTCCTTCCTGAAGGACGACTCCATCGACAACAAGGTG |
| | | CTGACCCGGTCCGACAAGAACCGGGGCAAGTCCGACAACGTGCCCTCCGAGGAGGTGGTGAAGAAGATGAA |
| | | GAACTACTGGCGGCAGCTGCTGAACGCCAAGCTGATCACCCAGCGGAAGTTCGACAACCTGACCAAGGCCG |
| | | AGCGGGGCGGCCTGTCCGAGCTGGACAAGGCCGGCTTCATCAAGCGGCAGCTGGTGGAGACCCGGCAGATC |
| | | ACCAAGCACGTGGCCCAGATCCTGGACTCCCGGATGAACACCAAGTACGACGAGAACGACAAGCTGATCCG |
| | | GGAGGTGAAGGTGATCACCCTGAAGTCCAAGCTGGTGTCCGACTTCCGGAAGGACTTCCAGTTCTACAAGGT |
| | | GCGGGAGATCAACAACTACCACCACGCCCACGACGCCTACCTGAACGCCGTGGTGGGCACCGCCCTGATCA |
| | | AGAAGTACCCCAAGCTGGAGTCCGAGTTCGTGTACGGCGACTACAAGGTGTACGACGTGCGGAAGATGATC |
| | | GCCAAGTCCGAGCAGGAGATCGGCAAGGCCACCGCCAAGTACTTCTTCTACTCCAACATCATGAACTTCTTC |
| | | AAGACCGAGATCACCCTGGCCAACGGCGAGATCCGGAAGCGGCCCCTGATCGAGACCAACGGCGAGACCG |
| | | GCGAGATCGTGTGGGACAAGGGCCGGGACTTCGCCACCGTGCGGAAGGTGCTGTCCATGCCCCAGGTGAAC |
| | | ATCGTGAAGAAGACCGAGGTGCAGACCGGCGGCTTCTCCAAGGAGTCCATCCTGCCCAAGCGGAACTCCGA |
| | | CAAGCTGATCGCCCGGAAGAAGGACTGGGACCCCAAGAAGTACGGCGGCTTCGACTCCCCCACCGTGGCCT |
| | | ACTCCGTGCTGGTGGTGGCCAAGGTGGAGAAGGGCAAGTCCAAGAAGCTGAAGTCCGTGAAGGAGCTGCTG |
| | | GGCATCACCATCATGGAGCGGTCCTCCTTCGAGAAGAACCCCATCGACTTCCTGGAGGCCAAGGGCTACAA |
| | | GGAGGTGAAGAAGGACCTGATCATCAAGCTGCCCAAGTACTCCCTGTTCGAGCTGGAGAACGGCCGGAAGC |
| | | GGATGCTGGCCTCCGCCGGCGAGCTGCAGAAGGGCAACGAGCTGGCCCTGCCCTCCAAGTACGTGAACTTC |
| | | CTGTACCTGGCCTCCCACTACGAGAAGCTGAAGGGCTCCCCCGAGGACAACGAGCAGAAGCAGCTGTTCGT |
| | | GGAGCAGCACAAGCACTACCTGGACGAGATCATCGAGCAGATCTCCGAGTTCTCCAAGCGGGTGATCCTGG |
| | | CCGACGCCAACCTGGACAAGGTGCTGTCCGCCTACAACAAGCACCGGGACAAGCCCATCCGGGAGCAGGCC |
| | | GAGAACATCATCCACCTGTTCACCCTGACCAACCTGGGCGCCCCCGCCGCCTTCAAGTACTTCGACACCACC |
| | | ATCGACCGGAAGCGGTACACCTCCACCAAGGAGGTGCTGGACGCCACCCTGATCCACCAGTCCATCACCGG |
| | | CCTGTACGAGACCCGGATCGACCTGTCCCAGCTGGGCGGCGACGGCGGCGGCTCCCCCAAGAAGAAGCGGA |
| | | AGGTGTGA |
| 1134 | Cas9 nickase ORF | ATGGACAAGAAGTACTCCATCGGCCTGGCCATCGGCACCAACTCCGTGGGCTGGGCCGTGATCACCGACGA |
| | | GTACAAGGTGCCCTCCAAGAAGTTCAAGGTGCTGGGCAACACCGACCGGCACTCCATCAAGAAGAACCTGA |
| | | TCGGCGCCCTGCTGTTCGACTCCGGCGAGACCGCCGAGGCCACCCGGCTGAAGCGGACCGCCCGGCGGCGG |
| | | TACACCCGGCGGAAGAACCGGATCTGCTACCTGCAGGAGATCTTCTCCAACGAGATGGCCAAGGTGGACGA |
| | | CTCCTTCTTCCACCGGCTGGAGGAGTCCTTCCTGGTGGAGGAGGACAAGAAGCACGAGCGGCACCCCATCTT |
| | | CGGCAACATCGTGGACGAGGTGGCCTACCACGAGAAGTACCCCACCATCTACCACCTGCGGAAGAAGCTGG |
| | | TGGACTCCACCGACAAGGCCGACCTGCGGCTGATCTACCTGGCCCTGGCCCACATGATCAAGTTCCGGGGCC |
| | | ACTTCCTGATCGAGGGCGACCTGAACCCCGACAACTCCGACGTGGACAAGCTGTTCATCCAGCTGGTGCAGA |
| | | CCTACAACCAGCTGTTCGAGGAGAACCCCATCAACGCCTCCGGCGTGGACGCCAAGGCCATCCTGTCCGCCC |
| | | GGCTGTCCAAGTCCCGGCGGCTGGAGAACCTGATCGCCCAGCTGCCCGGCGAGAAGAAGAACGGCCTGTTC |
| | | GGCAACCTGATCGCCCTGTCCCTGGGCCTGACCCCCAACTTCAAGTCCAACTTCGACCTGGCCGAGGACGCC |
| | | AAGCTGCAGCTGTCCAAGGACACCTACGACGACGACCTGGACAACCTGCTGGCCCAGATCGGCGACCAGTA |
| | | CGCCGACCTGTTCCTGGCCGCCAAGAACCTGTCCGACGCCATCCTGCTGTCCGACATCCTGCGGGTGAACAC |
| | | CGAGATCACCAAGGCCCCCCTGTCCGCCTCCATGATCAAGCGGTACGACGAGCACCACCAGGACCTGACCCT |
| | | GCTGAAGGCCCTGGTGCGGCAGCAGCTGCCCGAGAAGTACAAGGAGATCTTCTTCGACCAGTCCAAGAACG |
| | | GCTACGCCGGCTACATCGACGGCGGCGCCTCCCAGGAGGAGTTCTACAAGTTCATCAAGCCCATCCTGGAGA |
| | | AGATGGACGGCACCGAGGAGCTGCTGGTGAAGCTGAACCGGGAGGACCTGCTGCGGAAGCAGCGGACCTTC |
| | | GACAACGGCTCCATCCCCCACCAGATCCACCTGGGCGAGCTGCACGCCATCCTGCGGCGGCAGGAGGACTT |
| | | CTACCCCTTCCTGAAGGACAACCGGGAGAAGATCGAGAAGATCCTGACCTTCCGGATCCCCTACTACGTGGG |
| | | CCCCCTGGCCCGGGGCAACTCCCGGTTCGCCTGGATGACCCGGAAGTCCGAGGAGACCATCACCCCCTGGA |
| | | ACTTCGAGGAGGTGGTGGACAAGGGCGCCTCCGCCCAGTCCTTCATCGAGCGGATGACCAACTTCGACAAG |
| | | AACCTGCCCAACGAGAAGGTGCTGCCCAAGCACTCCCTGCTGTACGAGTACTTCACCGTGTACAACGAGCTG |
| | | ACCAAGGTGAAGTACGTGACCGAGGGCATGCGGAAGCCCGCCTTCCTGTCCGGCGAGCAGAAGAAGGCCAT |
| | | CGTGGACCTGCTGTTCAAGACCAACCGGAAGGTGACCGTGAAGCAGCTGAAGGAGGACTACTTCAAGAAGA |
| | | TCGAGTGCTTCGACTCCGTGGAGATCTCCGGCGTGGAGGACCGGTTCAACGCCTCCCTGGGCACCTACCACG |
| | | ACCTGCTGAAGATCATCAAGGACAAGGACTTCCTGGACAACGAGGAGAACGAGGACATCCTGGAGGACATC |
| | | GTGCTGACCCTGACCCTGTTCGAGGACCGGGAGATGATCGAGGAGCGGCTGAAGACCTACGCCCACCTGTTC |
| | | GACGACAAGGTGATGAAGCAGCTGAAGCGGCGGCGGTACACCGGCTGGGGCCGGCTGTCCCGGAAGCTGAT |
| | | CAACGGCATCCGGGACAAGCAGTCCGGCAAGACCATCCTGGACTTCCTGAAGTCCGACGGCTTCGCCAACC |
| | | GGAACTTCATGCAGCTGATCCACGACGACTCCCTGACCTTCAAGGAGGACATCCAGAAGGCCCAGGTGTCC |
| | | GGCCAGGGCGACTCCCTGCACGAGCACATCGCCAACCTGGCCGGCTCCCCCGCCATCAAGAAGGGCATCCT |
| | | GCAGACCGTGAAGGTGGTGGACGAGCTGGTGAAGGTGATGGGCCGGCACAAGCCCGAGAACATCGTGATCG |
| | | AGATGGCCCGGGAGAACCAGACCACCCAGAAGGGCCAGAAGAACTCCCGGGAGCGGATGAAGCGGATCGA |
| | | GGAGGGCATCAAGGAGCTGGGCTCCCAGATCCTGAAGGAGCACCCCGTGGAGAACACCCAGCTGCAGAACG |
| | | AGAAGCTGTACCTGTACTACCTGCAGAACGGCCGGGACATGTACGTGGACCAGGAGCTGGACATCAACCGG |
| | | CTGTCCGACTACGACGTGGACCACATCGTGCCCCAGTCCTTCCTGAAGGACGACTCCATCGACAACAAGGTG |
| | | CTGACCCGGTCCGACAAGAACCGGGGCAAGTCCGACAACGTGCCCTCCGAGGAGGTGGTGAAGAAGATGAA |
| | | GAACTACTGGCGGCAGCTGCTGAACGCCAAGCTGATCACCCAGCGGAAGTTCGACAACCTGACCAAGGCCG |
| | | AGCGGGGCGGCCTGTCCGAGCTGGACAAGGCCGGCTTCATCAAGCGGCAGCTGGTGGAGACCCGGCAGATC |
| | | ACCAAGCACGTGGCCCAGATCCTGGACTCCCGGATGAACACCAAGTACGACGAGAACGACAAGCTGATCCG |
| | | GGAGGTGAAGGTGATCACCCTGAAGTCCAAGCTGGTGTCCGACTTCCGGAAGGACTTCCAGTTCTACAAGGT |
| | | GCGGGAGATCAACAACTACCACCACGCCCACGACGCCTACCTGAACGCCGTGGTGGGCACCGCCCTGATCA |
| | | AGAAGTACCCCAAGCTGGAGTCCGAGTTCGTGTACGGCGACTACAAGGTGTACGACGTGCGGAAGATGATC |
| | | GCCAAGTCCGAGCAGGAGATCGGCAAGGCCACCGCCAAGTACTTCTTCTACTCCAACATCATGAACTTCTTC |
| | | AAGACCGAGATCACCCTGGCCAACGGCGAGATCCGGAAGCGGCCCCTGATCGAGACCAACGGCGAGACCG |
| | | GCGAGATCGTGTGGGACAAGGGCCGGGACTTCGCCACCGTGCGGAAGGTGCTGTCCATGCCCCAGGTGAAC |
| | | ATCGTGAAGAAGACCGAGGTGCAGACCGGCGGCTTCTCCAAGGAGTCCATCCTGCCCAAGCGGAACTCCGA |
| | | CAAGCTGATCGCCCGGAAGAAGGACTGGGACCCCAAGAAGTACGGCGGCTTCGACTCCCCCACCGTGGCCT |
| | | ACTCCGTGCTGGTGGTGGCCAAGGTGGAGAAGGGCAAGTCCAAGAAGCTGAAGTCCGTGAAGGAGCTGCTG |
| | | GGCATCACCATCATGGAGCGGTCCTCCTTCGAGAAGAACCCCATCGACTTCCTGGAGGCCAAGGGCTACAA |
| | | GGAGGTGAAGAAGGACCTGATCATCAAGCTGCCCAAGTACTCCCTGTTCGAGCTGGAGAACGGCCGGAAGC |
| | | GGATGCTGGCCTCCGCCGGCGAGCTGCAGAAGGGCAACGAGCTGGCCCTGCCCTCCAAGTACGTGAACTTC |
| | | CTGTACCTGGCCTCCCACTACGAGAAGCTGAAGGGCTCCCCCGAGGACAACGAGCAGAAGCAGCTGTTCGT |
| | | GGAGCAGCACAAGCACTACCTGGACGAGATCATCGAGCAGATCTCCGAGTTCTCCAAGCGGGTGATCCTGG |
| | | CCGACGCCAACCTGGACAAGGTGCTGTCCGCCTACAACAAGCACCGGGACAAGCCCATCCGGGAGCAGGCC |
| | | GAGAACATCATCCACCTGTTCACCCTGACCAACCTGGGCGCCCCCGCCGCCTTCAAGTACTTCGACACCACC |
| | | ATCGACCGGAAGCGGTACACCTCCACCAAGGAGGTGCTGGACGCCACCCTGATCCACCAGTCCATCACCGG |
| | | CCTGTACGAGACCCGGATCGACCTGTCCCAGCTGGGCGGCGACTGA |
| 1135 | Cas9 nickase | ATGGACAAGAAGTACTCCATCGGCCTGGCCATCGGCACCAACTCCGTGGGCTGGGCCGTGATCACCGACGA |
| | ORF | GTACAAGGTGCCCTCCAAGAAGTTCAAGGTGCTGGGCAACACCGACCGGCACTCCATCAAGAAGAACCTGA |
| | | TCGGCGCCCTGCTGTTCGACTCCGGCGAGACCGCCGAGGCCACCCGGCTGAAGCGGACCGCCCGGCGGCGG |
| | | TACACCCGGCGGAAGAACCGGATCTGCTACCTGCAGGAGATCTTCTCCAACGAGATGGCCAAGGTGGACGA |
| | | CTCCTTCTTCCACCGGCTGGAGGAGTCCTTCCTGGTGGAGGAGGACAAGAAGCACGAGCGGCACCCCATCTT |
| | | CGGCAACATCGTGGACGAGGTGGCCTACCACGAGAAGTACCCCACCATCTACCACCTGCGGAAGAAGCTGG |
| | | TGGACTCCACCGACAAGGCCGACCTGCGGCTGATCTACCTGGCCCTGGCCCACATGATCAAGTTCCGGGGCC |
| | | ACTTCCTGATCGAGGGCGACCTGAACCCCGACAACTCCGACGTGGACAAGCTGTTCATCCAGCTGGTGCAGA |
| | | CCTACAACCAGCTGTTCGAGGAGAACCCCATCAACGCCTCCGGCGTGGACGCCAAGGCCATCCTGTCCGCCC |
| | | GGCTGTCCAAGTCCCGGCGGCTGGAGAACCTGATCGCCCAGCTGCCCGGCGAGAAGAAGAACGGCCTGTTC |
| | | GGCAACCTGATCGCCCTGTCCCTGGGCCTGACCCCCAACTTCAAGTCCAACTTCGACCTGGCCGAGGACGCC |
| | | AAGCTGCAGCTGTCCAAGGACACCTACGACGACGACCTGGACAACCTGCTGGCCCAGATCGGCGACCAGTA |
| | | CGCCGACCTGTTCCTGGCCGCCAAGAACCTGTCCGACGCCATCCTGCTGTCCGACATCCTGCGGGTGAACAC |
| | | CGAGATCACCAAGGCCCCCCTGTCCGCCTCCATGATCAAGCGGTACGACGAGCACCACCAGGACCTGACCCT |
| | | GCTGAAGGCCCTGGTGCGGCAGCAGCTGCCCGAGAAGTACAAGGAGATCTTCTTCGACCAGTCCAAGAACG |
| | | GCTACGCCGGCTACATCGACGGCGGCGCCTCCCAGGAGGAGTTCTACAAGTTCATCAAGCCCATCCTGGAGA |
| | | AGATGGACGGCACCGAGGAGCTGCTGGTGAAGCTGAACCGGGAGGACCTGCTGCGGAAGCAGCGGACCTTC |
| | | GACAACGGCTCCATCCCCCACCAGATCCACCTGGGCGAGCTGCACGCCATCCTGCGGCGGCAGGAGGACTT |
| | | CTACCCCTTCCTGAAGGACAACCGGGAGAAGATCGAGAAGATCCTGACCTTCCGGATCCCCTACTACGTGGG |
| | | CCCCCTGGCCCGGGGCAACTCCCGGTTCGCCTGGATGACCCGGAAGTCCGAGGAGACCATCACCCCCTGGA |
| | | ACTTCGAGGAGGTGGTGGACAAGGGCGCCTCCGCCCAGTCCTTCATCGAGCGGATGACCAACTTCGACAAG |
| | | AACCTGCCCAACGAGAAGGTGCTGCCCAAGCACTCCCTGCTGTACGAGTACTTCACCGTGTACAACGAGCTG |
| | | ACCAAGGTGAAGTACGTGACCGAGGGCATGCGGAAGCCCGCCTTCCTGTCCGGCGAGCAGAAGAAGGCCAT |
| | | CGTGGACCTGCTGTTCAAGACCAACCGGAAGGTGACCGTGAAGCAGCTGAAGGAGGACTACTTCAAGAAGA |
| | | TCGAGTGCTTCGACTCCGTGGAGATCTCCGGCGTGGAGGACCGGTTCAACGCCTCCCTGGGCACCTACCACG |
| | | ACCTGCTGAAGATCATCAAGGACAAGGACTTCCTGGACAACGAGGAGAACGAGGACATCCTGGAGGACATC |
| | | GTGCTGACCCTGACCCTGTTCGAGGACCGGGAGATGATCGAGGAGCGGCTGAAGACCTACGCCCACCTGTTC |
| | | GACGACAAGGTGATGAAGCAGCTGAAGCGGCGGCGGTACACCGGCTGGGGCCGGCTGTCCCGGAAGCTGAT |
| | | CAACGGCATCCGGGACAAGCAGTCCGGCAAGACCATCCTGGACTTCCTGAAGTCCGACGGCTTCGCCAACC |
| | | GGAACTTCATGCAGCTGATCCACGACGACTCCCTGACCTTCAAGGAGGACATCCAGAAGGCCCAGGTGTCC |
| | | GGCCAGGGCGACTCCCTGCACGAGCACATCGCCAACCTGGCCGGCTCCCCCGCCATCAAGAAGGGCATCCT |
| | | GCAGACCGTGAAGGTGGTGGACGAGCTGGTGAAGGTGATGGGCCGGCACAAGCCCGAGAACATCGTGATCG |
| | | AGATGGCCCGGGAGAACCAGACCACCCAGAAGGGCCAGAAGAACTCCCGGGAGCGGATGAAGCGGATCGA |
| | | GGAGGGCATCAAGGAGCTGGGCTCCCAGATCCTGAAGGAGCACCCCGTGGAGAACACCCAGCTGCAGAACG |
| | | AGAAGCTGTACCTGTACTACCTGCAGAACGGCCGGGACATGTACGTGGACCAGGAGCTGGACATCAACCGG |
| | | CTGTCCGACTACGACGTGGACCACATCGTGCCCCAGTCCTTCCTGAAGGACGACTCCATCGACAACAAGGTG |
| | | CTGACCCGGTCCGACAAGAACCGGGGCAAGTCCGACAACGTGCCCTCCGAGGAGGTGGTGAAGAAGATGAA |
| | | GAACTACTGGCGGCAGCTGCTGAACGCCAAGCTGATCACCCAGCGGAAGTTCGACAACCTGACCAAGGCCG |
| | | AGCGGGGCGGCCTGTCCGAGCTGGACAAGGCCGGCTTCATCAAGCGGCAGCTGGTGGAGACCCGGCAGATC |
| | | ACCAAGCACGTGGCCCAGATCCTGGACTCCCGGATGAACACCAAGTACGACGAGAACGACAAGCTGATCCG |
| | | GGAGGTGAAGGTGATCACCCTGAAGTCCAAGCTGGTGTCCGACTTCCGGAAGGACTTCCAGTTCTACAAGGT |
| | | GCGGGAGATCAACAACTACCACCACGCCCACGACGCCTACCTGAACGCCGTGGTGGGCACCGCCCTGATCA |
| | | AGAAGTACCCCAAGCTGGAGTCCGAGTTCGTGTACGGCGACTACAAGGTGTACGACGTGCGGAAGATGATC |
| | | GCCAAGTCCGAGCAGGAGATCGGCAAGGCCACCGCCAAGTACTTCTTCTACTCCAACATCATGAACTTCTTC |
| | | AAGACCGAGATCACCCTGGCCAACGGCGAGATCCGGAAGCGGCCCCTGATCGAGACCAACGGCGAGACCG |
| | | GCGAGATCGTGTGGGACAAGGGCCGGGACTTCGCCACCGTGCGGAAGGTGCTGTCCATGCCCCAGGTGAAC |
| | | ATCGTGAAGAAGACCGAGGTGCAGACCGGCGGCTTCTCCAAGGAGTCCATCCTGCCCAAGCGGAACTCCGA |
| | | CAAGCTGATCGCCCGGAAGAAGGACTGGGACCCCAAGAAGTACGGCGGCTTCGACTCCCCCACCGTGGCCT |
| | | ACTCCGTGCTGGTGGTGGCCAAGGTGGAGAAGGGCAAGTCCAAGAAGCTGAAGTCCGTGAAGGAGCTGCTG |
| | | GGCATCACCATCATGGAGCGGTCCTCCTTCGAGAAGAACCCCATCGACTTCCTGGAGGCCAAGGGCTACAA |
| | | GGAGGTGAAGAAGGACCTGATCATCAAGCTGCCCAAGTACTCCCTGTTCGAGCTGGAGAACGGCCGGAAGC |
| | | GGATGCTGGCCTCCGCCGGCGAGCTGCAGAAGGGCAACGAGCTGGCCCTGCCCTCCAAGTACGTGAACTTC |
| | | CTGTACCTGGCCTCCCACTACGAGAAGCTGAAGGGCTCCCCCGAGGACAACGAGCAGAAGCAGCTGTTCGT |
| | | GGAGCAGCACAAGCACTACCTGGACGAGATCATCGAGCAGATCTCCGAGTTCTCCAAGCGGGTGATCCTGG |
| | | CCGACGCCAACCTGGACAAGGTGCTGTCCGCCTACAACAAGCACCGGGACAAGCCCATCCGGGAGCAGGCC |
| | | GAGAACATCATCCACCTGTTCACCCTGACCAACCTGGGCGCCCCCGCCGCCTTCAAGTACTTCGACACCACC |
| | | ATCGACCGGAAGCGGTACACCTCCACCAAGGAGGTGCTGGACGCCACCCTGATCCACCAGTCCATCACCGG |
| | | CCTGTACGAGACCCGGATCGACCTGTCCCAGCTGGGCGGCGACGGCTCCGGCTCCCCCAAGAAGAAGCGGA |
| | | AGGTGGACGGCTCCCCCAAGAAGAAGCGGAAGGTGGACTCCGGCTGA |
| 1136 | dCas9 ORF | ATGGACAAGAAGTACTCCATCGGCCTGGCCATCGGCACCAACTCCGTGGGCTGGGCCGTGATCACCGACGA |
| | | GTACAAGGTGCCCTCCAAGAAGTTCAAGGTGCTGGGCAACACCGACCGGCACTCCATCAAGAAGAACCTGA |
| | | TCGGCGCCCTGCTGTTCGACTCCGGCGAGACCGCCGAGGCCACCCGGCTGAAGCGGACCGCCCGGCGGCGG |
| | | TACACCCGGCGGAAGAACCGGATCTGCTACCTGCAGGAGATCTTCTCCAACGAGATGGCCAAGGTGGACGA |
| | | CTCCTTCTTCCACCGGCTGGAGGAGTCCTTCCTGGTGGAGGAGGACAAGAAGCACGAGCGGCACCCCATCTT |
| | | CGGCAACATCGTGGACGAGGTGGCCTACCACGAGAAGTACCCCACCATCTACCACCTGCGGAAGAAGCTGG |
| | | TGGACTCCACCGACAAGGCCGACCTGCGGCTGATCTACCTGGCCCTGGCCCACATGATCAAGTTCCGGGGCC |
| | | ACTTCCTGATCGAGGGCGACCTGAACCCCGACAACTCCGACGTGGACAAGCTGTTCATCCAGCTGGTGCAGA |
| | | CCTACAACCAGCTGTTCGAGGAGAACCCCATCAACGCCTCCGGCGTGGACGCCAAGGCCATCCTGTCCGCCC |
| | | GGCTGTCCAAGTCCCGGCGGCTGGAGAACCTGATCGCCCAGCTGCCCGGCGAGAAGAAGAACGGCCTGTTC |
| | | GGCAACCTGATCGCCCTGTCCCTGGGCCTGACCCCCAACTTCAAGTCCAACTTCGACCTGGCCGAGGACGCC |
| | | AAGCTGCAGCTGTCCAAGGACACCTACGACGACGACCTGGACAACCTGCTGGCCCAGATCGGCGACCAGTA |
| | | CGCCGACCTGTTCCTGGCCGCCAAGAACCTGTCCGACGCCATCCTGCTGTCCGACATCCTGCGGGTGAACAC |
| | | CGAGATCACCAAGGCCCCCCTGTCCGCCTCCATGATCAAGCGGTACGACGAGCACCACCAGGACCTGACCCT |
| | | GCTGAAGGCCCTGGTGCGGCAGCAGCTGCCCGAGAAGTACAAGGAGATCTTCTTCGACCAGTCCAAGAACG |
| | | GCTACGCCGGCTACATCGACGGCGGCGCCTCCCAGGAGGAGTTCTACAAGTTCATCAAGCCCATCCTGGAGA |
| | | AGATGGACGGCACCGAGGAGCTGCTGGTGAAGCTGAACCGGGAGGACCTGCTGCGGAAGCAGCGGACCTTC |
| | | GACAACGGCTCCATCCCCCACCAGATCCACCTGGGCGAGCTGCACGCCATCCTGCGGCGGCAGGAGGACTT |
| | | CTACCCCTTCCTGAAGGACAACCGGGAGAAGATCGAGAAGATCCTGACCTTCCGGATCCCCTACTACGTGGG |
| | | CCCCCTGGCCCGGGGCAACTCCCGGTTCGCCTGGATGACCCGGAAGTCCGAGGAGACCATCACCCCCTGGA |
| | | ACTTCGAGGAGGTGGTGGACAAGGGCGCCTCCGCCCAGTCCTTCATCGAGCGGATGACCAACTTCGACAAG |
| | | AACCTGCCCAACGAGAAGGTGCTGCCCAAGCACTCCCTGCTGTACGAGTACTTCACCGTGTACAACGAGCTG |
| | | ACCAAGGTGAAGTACGTGACCGAGGGCATGCGGAAGCCCGCCTTCCTGTCCGGCGAGCAGAAGAAGGCCAT |
| | | CGTGGACCTGCTGTTCAAGACCAACCGGAAGGTGACCGTGAAGCAGCTGAAGGAGGACTACTTCAAGAAGA |
| | | TCGAGTGCTTCGACTCCGTGGAGATCTCCGGCGTGGAGGACCGGTTCAACGCCTCCCTGGGCACCTACCACG |
| | | ACCTGCTGAAGATCATCAAGGACAAGGACTTCCTGGACAACGAGGAGAACGAGGACATCCTGGAGGACATC |
| | | GTGCTGACCCTGACCCTGTTCGAGGACCGGGAGATGATCGAGGAGCGGCTGAAGACCTACGCCCACCTGTTC |
| | | GACGACAAGGTGATGAAGCAGCTGAAGCGGCGGCGGTACACCGGCTGGGGCCGGCTGTCCCGGAAGCTGAT |
| | | CAACGGCATCCGGGACAAGCAGTCCGGCAAGACCATCCTGGACTTCCTGAAGTCCGACGGCTTCGCCAACC |
| | | GGAACTTCATGCAGCTGATCCACGACGACTCCCTGACCTTCAAGGAGGACATCCAGAAGGCCCAGGTGTCC |
| | | GGCCAGGGCGACTCCCTGCACGAGCACATCGCCAACCTGGCCGGCTCCCCCGCCATCAAGAAGGGCATCCT |
| | | GCAGACCGTGAAGGTGGTGGACGAGCTGGTGAAGGTGATGGGCCGGCACAAGCCCGAGAACATCGTGATCG |
| | | AGATGGCCCGGGAGAACCAGACCACCCAGAAGGGCCAGAAGAACTCCCGGGAGCGGATGAAGCGGATCGA |
| | | GGAGGGCATCAAGGAGCTGGGCTCCCAGATCCTGAAGGAGCACCCCGTGGAGAACACCCAGCTGCAGAACG |
| | | AGAAGCTGTACCTGTACTACCTGCAGAACGGCCGGGACATGTACGTGGACCAGGAGCTGGACATCAACCGG |
| | | CTGTCCGACTACGACGTGGACGCCATCGTGCCCCAGTCCTTCCTGAAGGACGACTCCATCGACAACAAGGTG |
| | | CTGACCCGGTCCGACAAGAACCGGGGCAAGTCCGACAACGTGCCCTCCGAGGAGGTGGTGAAGAAGATGAA |
| | | GAACTACTGGCGGCAGCTGCTGAACGCCAAGCTGATCACCCAGCGGAAGTTCGACAACCTGACCAAGGCCG |
| | | AGCGGGGCGGCCTGTCCGAGCTGGACAAGGCCGGCTTCATCAAGCGGCAGCTGGTGGAGACCCGGCAGATC |
| | | ACCAAGCACGTGGCCCAGATCCTGGACTCCCGGATGAACACCAAGTACGACGAGAACGACAAGCTGATCCG |
| | | GGAGGTGAAGGTGATCACCCTGAAGTCCAAGCTGGTGTCCGACTTCCGGAAGGACTTCCAGTTCTACAAGGT |
| | | GCGGGAGATCAACAACTACCACCACGCCCACGACGCCTACCTGAACGCCGTGGTGGGCACCGCCCTGATCA |
| | | AGAAGTACCCCAAGCTGGAGTCCGAGTTCGTGTACGGCGACTACAAGGTGTACGACGTGCGGAAGATGATC |
| | | GCCAAGTCCGAGCAGGAGATCGGCAAGGCCACCGCCAAGTACTTCTTCTACTCCAACATCATGAACTTCTTC |
| | | AAGACCGAGATCACCCTGGCCAACGGCGAGATCCGGAAGCGGCCCCTGATCGAGACCAACGGCGAGACCG |
| | | GCGAGATCGTGTGGGACAAGGGCCGGGACTTCGCCACCGTGCGGAAGGTGCTGTCCATGCCCCAGGTGAAC |
| | | ATCGTGAAGAAGACCGAGGTGCAGACCGGCGGCTTCTCCAAGGAGTCCATCCTGCCCAAGCGGAACTCCGA |
| | | CAAGCTGATCGCCCGGAAGAAGGACTGGGACCCCAAGAAGTACGGCGGCTTCGACTCCCCCACCGTGGCCT |
| | | ACTCCGTGCTGGTGGTGGCCAAGGTGGAGAAGGGCAAGTCCAAGAAGCTGAAGTCCGTGAAGGAGCTGCTG |
| | | GGCATCACCATCATGGAGCGGTCCTCCTTCGAGAAGAACCCCATCGACTTCCTGGAGGCCAAGGGCTACAA |
| | | GGAGGTGAAGAAGGACCTGATCATCAAGCTGCCCAAGTACTCCCTGTTCGAGCTGGAGAACGGCCGGAAGC |
| | | GGATGCTGGCCTCCGCCGGCGAGCTGCAGAAGGGCAACGAGCTGGCCCTGCCCTCCAAGTACGTGAACTTC |
| | | CTGTACCTGGCCTCCCACTACGAGAAGCTGAAGGGCTCCCCCGAGGACAACGAGCAGAAGCAGCTGTTCGT |
| | | GGAGCAGCACAAGCACTACCTGGACGAGATCATCGAGCAGATCTCCGAGTTCTCCAAGCGGGTGATCCTGG |
| | | CCGACGCCAACCTGGACAAGGTGCTGTCCGCCTACAACAAGCACCGGGACAAGCCCATCCGGGAGCAGGCC |
| | | GAGAACATCATCCACCTGTTCACCCTGACCAACCTGGGCGCCCCCGCCGCCTTCAAGTACTTCGACACCACC |
| | | ATCGACCGGAAGCGGTACACCTCCACCAAGGAGGTGCTGGACGCCACCCTGATCCACCAGTCCATCACCGG |
| | | CCTGTACGAGACCCGGATCGACCTGTCCCAGCTGGGCGGCGACGGCGGCGGCTCCCCCAAGAAGAAGCGGA |
| | | AGGTGTGA |
| 1137 | dCas9 ORF | ATGGACAAGAAGTACTCCATCGGCCTGGCCATCGGCACCAACTCCGTGGGCTGGGCCGTGATCACCGACGA |
| | | GTACAAGGTGCCCTCCAAGAAGTTCAAGGTGCTGGGCAACACCGACCGGCACTCCATCAAGAAGAACCTGA |
| | | TCGGCGCCCTGCTGTTCGACTCCGGCGAGACCGCCGAGGCCACCCGGCTGAAGCGGACCGCCCGGCGGCGG |
| | | TACACCCGGCGGAAGAACCGGATCTGCTACCTGCAGGAGATCTTCTCCAACGAGATGGCCAAGGTGGACGA |
| | | CTCCTTCTTCCACCGGCTGGAGGAGTCCTTCCTGGTGGAGGAGGACAAGAAGCACGAGCGGCACCCCATCTT |
| | | CGGCAACATCGTGGACGAGGTGGCCTACCACGAGAAGTACCCCACCATCTACCACCTGCGGAAGAAGCTGG |
| | | TGGACTCCACCGACAAGGCCGACCTGCGGCTGATCTACCTGGCCCTGGCCCACATGATCAAGTTCCGGGGCC |
| | | ACTTCCTGATCGAGGGCGACCTGAACCCCGACAACTCCGACGTGGACAAGCTGTTCATCCAGCTGGTGCAGA |
| | | CCTACAACCAGCTGTTCGAGGAGAACCCCATCAACGCCTCCGGCGTGGACGCCAAGGCCATCCTGTCCGCCC |
| | | GGCTGTCCAAGTCCCGGCGGCTGGAGAACCTGATCGCCCAGCTGCCCGGCGAGAAGAAGAACGGCCTGTTC |
| | | GGCAACCTGATCGCCCTGTCCCTGGGCCTGACCCCCAACTTCAAGTCCAACTTCGACCTGGCCGAGGACGCC |
| | | AAGCTGCAGCTGTCCAAGGACACCTACGACGACGACCTGGACAACCTGCTGGCCCAGATCGGCGACCAGTA |
| | | CGCCGACCTGTTCCTGGCCGCCAAGAACCTGTCCGACGCCATCCTGCTGTCCGACATCCTGCGGGTGAACAC |
| | | CGAGATCACCAAGGCCCCCCTGTCCGCCTCCATGATCAAGCGGTACGACGAGCACCACCAGGACCTGACCCT |
| | | GCTGAAGGCCCTGGTGCGGCAGCAGCTGCCCGAGAAGTACAAGGAGATCTTCTTCGACCAGTCCAAGAACG |
| | | GCTACGCCGGCTACATCGACGGCGGCGCCTCCCAGGAGGAGTTCTACAAGTTCATCAAGCCCATCCTGGAGA |
| | | AGATGGACGGCACCGAGGAGCTGCTGGTGAAGCTGAACCGGGAGGACCTGCTGCGGAAGCAGCGGACCTTC |
| | | GACAACGGCTCCATCCCCCACCAGATCCACCTGGGCGAGCTGCACGCCATCCTGCGGCGGCAGGAGGACTT |
| | | CTACCCCTTCCTGAAGGACAACCGGGAGAAGATCGAGAAGATCCTGACCTTCCGGATCCCCTACTACGTGGG |
| | | CCCCCTGGCCCGGGGCAACTCCCGGTTCGCCTGGATGACCCGGAAGTCCGAGGAGACCATCACCCCCTGGA |
| | | ACTTCGAGGAGGTGGTGGACAAGGGCGCCTCCGCCCAGTCCTTCATCGAGCGGATGACCAACTTCGACAAG |
| | | AACCTGCCCAACGAGAAGGTGCTGCCCAAGCACTCCCTGCTGTACGAGTACTTCACCGTGTACAACGAGCTG |
| | | ACCAAGGTGAAGTACGTGACCGAGGGCATGCGGAAGCCCGCCTTCCTGTCCGGCGAGCAGAAGAAGGCCAT |
| | | CGTGGACCTGCTGTTCAAGACCAACCGGAAGGTGACCGTGAAGCAGCTGAAGGAGGACTACTTCAAGAAGA |
| | | TCGAGTGCTTCGACTCCGTGGAGATCTCCGGCGTGGAGGACCGGTTCAACGCCTCCCTGGGCACCTACCACG |
| | | ACCTGCTGAAGATCATCAAGGACAAGGACTTCCTGGACAACGAGGAGAACGAGGACATCCTGGAGGACATC |
| | | GTGCTGACCCTGACCCTGTTCGAGGACCGGGAGATGATCGAGGAGCGGCTGAAGACCTACGCCCACCTGTTC |
| | | GACGACAAGGTGATGAAGCAGCTGAAGCGGCGGCGGTACACCGGCTGGGGCCGGCTGTCCCGGAAGCTGAT |
| | | CAACGGCATCCGGGACAAGCAGTCCGGCAAGACCATCCTGGACTTCCTGAAGTCCGACGGCTTCGCCAACC |
| | | GGAACTTCATGCAGCTGATCCACGACGACTCCCTGACCTTCAAGGAGGACATCCAGAAGGCCCAGGTGTCC |
| | | GGCCAGGGCGACTCCCTGCACGAGCACATCGCCAACCTGGCCGGCTCCCCCGCCATCAAGAAGGGCATCCT |
| | | GCAGACCGTGAAGGTGGTGGACGAGCTGGTGAAGGTGATGGGCCGGCACAAGCCCGAGAACATCGTGATCG |
| | | AGATGGCCCGGGAGAACCAGACCACCCAGAAGGGCCAGAAGAACTCCCGGGAGCGGATGAAGCGGATCGA |
| | | GGAGGGCATCAAGGAGCTGGGCTCCCAGATCCTGAAGGAGCACCCCGTGGAGAACACCCAGCTGCAGAACG |
| | | AGAAGCTGTACCTGTACTACCTGCAGAACGGCCGGGACATGTACGTGGACCAGGAGCTGGACATCAACCGG |
| | | CTGTCCGACTACGACGTGGACGCCATCGTGCCCCAGTCCTTCCTGAAGGACGACTCCATCGACAACAAGGTG |
| | | CTGACCCGGTCCGACAAGAACCGGGGCAAGTCCGACAACGTGCCCTCCGAGGAGGTGGTGAAGAAGATGAA |
| | | GAACTACTGGCGGCAGCTGCTGAACGCCAAGCTGATCACCCAGCGGAAGTTCGACAACCTGACCAAGGCCG |
| | | AGCGGGGCGGCCTGTCCGAGCTGGACAAGGCCGGCTTCATCAAGCGGCAGCTGGTGGAGACCCGGCAGATC |
| | | ACCAAGCACGTGGCCCAGATCCTGGACTCCCGGATGAACACCAAGTACGACGAGAACGACAAGCTGATCCG |
| | | GGAGGTGAAGGTGATCACCCTGAAGTCCAAGCTGGTGTCCGACTTCCGGAAGGACTTCCAGTTCTACAAGGT |
| | | GCGGGAGATCAACAACTACCACCACGCCCACGACGCCTACCTGAACGCCGTGGTGGGCACCGCCCTGATCA |
| | | AGAAGTACCCCAAGCTGGAGTCCGAGTTCGTGTACGGCGACTACAAGGTGTACGACGTGCGGAAGATGATC |
| | | GCCAAGTCCGAGCAGGAGATCGGCAAGGCCACCGCCAAGTACTTCTTCTACTCCAACATCATGAACTTCTTC |
| | | AAGACCGAGATCACCCTGGCCAACGGCGAGATCCGGAAGCGGCCCCTGATCGAGACCAACGGCGAGACCG |
| | | GCGAGATCGTGTGGGACAAGGGCCGGGACTTCGCCACCGTGCGGAAGGTGCTGTCCATGCCCCAGGTGAAC |
| | | ATCGTGAAGAAGACCGAGGTGCAGACCGGCGGCTTCTCCAAGGAGTCCATCCTGCCCAAGCGGAACTCCGA |
| | | CAAGCTGATCGCCCGGAAGAAGGACTGGGACCCCAAGAAGTACGGCGGCTTCGACTCCCCCACCGTGGCCT |
| | | ACTCCGTGCTGGTGGTGGCCAAGGTGGAGAAGGGCAAGTCCAAGAAGCTGAAGTCCGTGAAGGAGCTGCTG |
| | | GGCATCACCATCATGGAGCGGTCCTCCTTCGAGAAGAACCCCATCGACTTCCTGGAGGCCAAGGGCTACAA |
| | | GGAGGTGAAGAAGGACCTGATCATCAAGCTGCCCAAGTACTCCCTGTTCGAGCTGGAGAACGGCCGGAAGC |
| | | GGATGCTGGCCTCCGCCGGCGAGCTGCAGAAGGGCAACGAGCTGGCCCTGCCCTCCAAGTACGTGAACTTC |
| | | CTGTACCTGGCCTCCCACTACGAGAAGCTGAAGGGCTCCCCCGAGGACAACGAGCAGAAGCAGCTGTTCGT |
| | | GGAGCAGCACAAGCACTACCTGGACGAGATCATCGAGCAGATCTCCGAGTTCTCCAAGCGGGTGATCCTGG |
| | | CCGACGCCAACCTGGACAAGGTGCTGTCCGCCTACAACAAGCACCGGGACAAGCCCATCCGGGAGCAGGCC |
| | | GAGAACATCATCCACCTGTTCACCCTGACCAACCTGGGCGCCCCCGCCGCCTTCAAGTACTTCGACACCACC |
| | | ATCGACCGGAAGCGGTACACCTCCACCAAGGAGGTGCTGGACGCCACCCTGATCCACCAGTCCATCACCGG |
| | | CCTGTACGAGACCCGGATCGACCTGTCCCAGCTGGGCGGCGACTGA |
| 1138 | dCas9 ORF | ATGGACAAGAAGTACTCCATCGGCCTGGCCATCGGCACCAACTCCGTGGGCTGGGCCGTGATCACCGACGA |
| | | GTACAAGGTGCCCTCCAAGAAGTTCAAGGTGCTGGGCAACACCGACCGGCACTCCATCAAGAAGAACCTGA |
| | | TCGGCGCCCTGCTGTTCGACTCCGGCGAGACCGCCGAGGCCACCCGGCTGAAGCGGACCGCCCGGCGGCGG |
| | | TACACCCGGCGGAAGAACCGGATCTGCTACCTGCAGGAGATCTTCTCCAACGAGATGGCCAAGGTGGACGA |
| | | CTCCTTCTTCCACCGGCTGGAGGAGTCCTTCCTGGTGGAGGAGGACAAGAAGCACGAGCGGCACCCCATCTT |
| | | CGGCAACATCGTGGACGAGGTGGCCTACCACGAGAAGTACCCCACCATCTACCACCTGCGGAAGAAGCTGG |
| | | TGGACTCCACCGACAAGGCCGACCTGCGGCTGATCTACCTGGCCCTGGCCCACATGATCAAGTTCCGGGGCC |
| | | ACTTCCTGATCGAGGGCGACCTGAACCCCGACAACTCCGACGTGGACAAGCTGTTCATCCAGCTGGTGCAGA |
| | | CCTACAACCAGCTGTTCGAGGAGAACCCCATCAACGCCTCCGGCGTGGACGCCAAGGCCATCCTGTCCGCCC |
| | | GGCTGTCCAAGTCCCGGCGGCTGGAGAACCTGATCGCCCAGCTGCCCGGCGAGAAGAAGAACGGCCTGTTC |
| | | GGCAACCTGATCGCCCTGTCCCTGGGCCTGACCCCCAACTTCAAGTCCAACTTCGACCTGGCCGAGGACGCC |
| | | AAGCTGCAGCTGTCCAAGGACACCTACGACGACGACCTGGACAACCTGCTGGCCCAGATCGGCGACCAGTA |
| | | CGCCGACCTGTTCCTGGCCGCCAAGAACCTGTCCGACGCCATCCTGCTGTCCGACATCCTGCGGGTGAACAC |
| | | CGAGATCACCAAGGCCCCCCTGTCCGCCTCCATGATCAAGCGGTACGACGAGCACCACCAGGACCTGACCCT |
| | | GCTGAAGGCCCTGGTGCGGCAGCAGCTGCCCGAGAAGTACAAGGAGATCTTCTTCGACCAGTCCAAGAACG |
| | | GCTACGCCGGCTACATCGACGGCGGCGCCTCCCAGGAGGAGTTCTACAAGTTCATCAAGCCCATCCTGGAGA |
| | | AGATGGACGGCACCGAGGAGCTGCTGGTGAAGCTGAACCGGGAGGACCTGCTGCGGAAGCAGCGGACCTTC |
| | | GACAACGGCTCCATCCCCCACCAGATCCACCTGGGCGAGCTGCACGCCATCCTGCGGCGGCAGGAGGACTT |
| | | CTACCCCTTCCTGAAGGACAACCGGGAGAAGATCGAGAAGATCCTGACCTTCCGGATCCCCTACTACGTGGG |
| | | CCCCCTGGCCCGGGGCAACTCCCGGTTCGCCTGGATGACCCGGAAGTCCGAGGAGACCATCACCCCCTGGA |
| | | ACTTCGAGGAGGTGGTGGACAAGGGCGCCTCCGCCCAGTCCTTCATCGAGCGGATGACCAACTTCGACAAG |
| | | AACCTGCCCAACGAGAAGGTGCTGCCCAAGCACTCCCTGCTGTACGAGTACTTCACCGTGTACAACGAGCTG |
| | | ACCAAGGTGAAGTACGTGACCGAGGGCATGCGGAAGCCCGCCTTCCTGTCCGGCGAGCAGAAGAAGGCCAT |
| | | CGTGGACCTGCTGTTCAAGACCAACCGGAAGGTGACCGTGAAGCAGCTGAAGGAGGACTACTTCAAGAAGA |
| | | TCGAGTGCTTCGACTCCGTGGAGATCTCCGGCGTGGAGGACCGGTTCAACGCCTCCCTGGGCACCTACCACG |
| | | ACCTGCTGAAGATCATCAAGGACAAGGACTTCCTGGACAACGAGGAGAACGAGGACATCCTGGAGGACATC |
| | | GTGCTGACCCTGACCCTGTTCGAGGACCGGGAGATGATCGAGGAGCGGCTGAAGACCTACGCCCACCTGTTC |
| | | GACGACAAGGTGATGAAGCAGCTGAAGCGGCGGCGGTACACCGGCTGGGGCCGGCTGTCCCGGAAGCTGAT |
| | | CAACGGCATCCGGGACAAGCAGTCCGGCAAGACCATCCTGGACTTCCTGAAGTCCGACGGCTTCGCCAACC |
| | | GGAACTTCATGCAGCTGATCCACGACGACTCCCTGACCTTCAAGGAGGACATCCAGAAGGCCCAGGTGTCC |
| | | GGCCAGGGCGACTCCCTGCACGAGCACATCGCCAACCTGGCCGGCTCCCCCGCCATCAAGAAGGGCATCCT |
| | | GCAGACCGTGAAGGTGGTGGACGAGCTGGTGAAGGTGATGGGCCGGCACAAGCCCGAGAACATCGTGATCG |
| | | AGATGGCCCGGGAGAACCAGACCACCCAGAAGGGCCAGAAGAACTCCCGGGAGCGGATGAAGCGGATCGA |
| | | GGAGGGCATCAAGGAGCTGGGCTCCCAGATCCTGAAGGAGCACCCCGTGGAGAACACCCAGCTGCAGAACG |
| | | AGAAGCTGTACCTGTACTACCTGCAGAACGGCCGGGACATGTACGTGGACCAGGAGCTGGACATCAACCGG |
| | | CTGTCCGACTACGACGTGGACGCCATCGTGCCCCAGTCCTTCCTGAAGGACGACTCCATCGACAACAAGGTG |
| | | CTGACCCGGTCCGACAAGAACCGGGGCAAGTCCGACAACGTGCCCTCCGAGGAGGTGGTGAAGAAGATGAA |
| | | GAACTACTGGCGGCAGCTGCTGAACGCCAAGCTGATCACCCAGCGGAAGTTCGACAACCTGACCAAGGCCG |
| | | AGCGGGGCGGCCTGTCCGAGCTGGACAAGGCCGGCTTCATCAAGCGGCAGCTGGTGGAGACCCGGCAGATC |
| | | ACCAAGCACGTGGCCCAGATCCTGGACTCCCGGATGAACACCAAGTACGACGAGAACGACAAGCTGATCCG |
| | | GGAGGTGAAGGTGATCACCCTGAAGTCCAAGCTGGTGTCCGACTTCCGGAAGGACTTCCAGTTCTACAAGGT |
| | | GCGGGAGATCAACAACTACCACCACGCCCACGACGCCTACCTGAACGCCGTGGTGGGCACCGCCCTGATCA |
| | | AGAAGTACCCCAAGCTGGAGTCCGAGTTCGTGTACGGCGACTACAAGGTGTACGACGTGCGGAAGATGATC |
| | | GCCAAGTCCGAGCAGGAGATCGGCAAGGCCACCGCCAAGTACTTCTTCTACTCCAACATCATGAACTTCTTC |
| | | AAGACCGAGATCACCCTGGCCAACGGCGAGATCCGGAAGCGGCCCCTGATCGAGACCAACGGCGAGACCG |
| | | GCGAGATCGTGTGGGACAAGGGCCGGGACTTCGCCACCGTGCGGAAGGTGCTGTCCATGCCCCAGGTGAAC |
| | | ATCGTGAAGAAGACCGAGGTGCAGACCGGCGGCTTCTCCAAGGAGTCCATCCTGCCCAAGCGGAACTCCGA |
| | | CAAGCTGATCGCCCGGAAGAAGGACTGGGACCCCAAGAAGTACGGCGGCTTCGACTCCCCCACCGTGGCCT |
| | | ACTCCGTGCTGGTGGTGGCCAAGGTGGAGAAGGGCAAGTCCAAGAAGCTGAAGTCCGTGAAGGAGCTGCTG |
| | | GGCATCACCATCATGGAGCGGTCCTCCTTCGAGAAGAACCCCATCGACTTCCTGGAGGCCAAGGGCTACAA |
| | | GGAGGTGAAGAAGGACCTGATCATCAAGCTGCCCAAGTACTCCCTGTTCGAGCTGGAGAACGGCCGGAAGC |
| | | GGATGCTGGCCTCCGCCGGCGAGCTGCAGAAGGGCAACGAGCTGGCCCTGCCCTCCAAGTACGTGAACTTC |
| | | CTGTACCTGGCCTCCCACTACGAGAAGCTGAAGGGCTCCCCCGAGGACAACGAGCAGAAGCAGCTGTTCGT |
| | | GGAGCAGCACAAGCACTACCTGGACGAGATCATCGAGCAGATCTCCGAGTTCTCCAAGCGGGTGATCCTGG |
| | | CCGACGCCAACCTGGACAAGGTGCTGTCCGCCTACAACAAGCACCGGGACAAGCCCATCCGGGAGCAGGCC |
| | | GAGAACATCATCCACCTGTTCACCCTGACCAACCTGGGCGCCCCCGCCGCCTTCAAGTACTTCGACACCACC |
| | | ATCGACCGGAAGCGGTACACCTCCACCAAGGAGGTGCTGGACGCCACCCTGATCCACCAGTCCATCACCGG |
| | | CCTGTACGAGACCCGGATCGACCTGTCCCAGCTGGGCGGCGACGGCTCCGGCTCCCCCAAGAAGAAGCGGA |
| | | AGGTGGACGGCTCCCCCAAGAAGAAGCGGAAGGTGGACTCCGGCTGA |
| 1139 | Cas9 ORF | ATGGACAAGAAGTACAGCATCGGCCTGGACATCGGCACCAACAGCGTGGGCTGGGCCGTGATCACCGACGA |
| | | GTACAAGGTGCCCAGCAAGAAGTTCAAGGTGCTGGGCAACACCGACCGGCACAGCATCAAGAAGAACCTGA |
| | | TCGGCGCCCTGCTGTTCGACAGCGGCGAGACCGCCGAGGCCACCCGGCTGAAGCGGACCGCCCGGCGGCGG |
| | | TACACCCGGCGGAAGAACCGGATCTGCTACCTGCAGGAGATCTTCAGCAACGAGATGGCCAAGGTGGACGA |
| | | CAGCTTCTTCCACCGGCTGGAGGAGAGCTTCCTGGTGGAGGAGGACAAGAAGCACGAGCGGCACCCCATCT |
| | | TCGGCAACATCGTGGACGAGGTGGCCTACCACGAGAAGTACCCCACCATCTACCACCTGCGGAAGAAGCTG |
| | | GTGGACAGCACCGACAAGGCCGACCTGCGGCTGATCTACCTGGCCCTGGCCCACATGATCAAGTTCCGGGG |
| | | CCACTTCCTGATCGAGGGCGACCTGAACCCCGACAACAGCGACGTGGACAAGCTGTTCATCCAGCTGGTGCA |
| | | GACCTACAACCAGCTGTTCGAGGAGAACCCCATCAACGCCAGCGGCGTGGACGCCAAGGCCATCCTGAGCG |
| | | CCCGGCTGAGCAAGAGCCGGCGGCTGGAGAACCTGATCGCCCAGCTGCCCGGCGAGAAGAAGAACGGCCTG |
| | | TTCGGCAACCTGATCGCCCTGAGCCTGGGCCTGACCCCCAACTTCAAGAGCAACTTCGACCTGGCCGAGGAC |
| | | GCCAAGCTGCAGCTGAGCAAGGACACCTACGACGACGACCTGGACAACCTGCTGGCCCAGATCGGCGACCA |
| | | GTACGCCGACCTGTTCCTGGCCGCCAAGAACCTGAGCGACGCCATCCTGCTGAGCGACATCCTGCGGGTGAA |
| | | CACCGAGATCACCAAGGCCCCCCTGAGCGCCAGCATGATCAAGCGGTACGACGAGCACCACCAGGACCTGA |
| | | CCCTGCTGAAGGCCCTGGTGCGGCAGCAGCTGCCCGAGAAGTACAAGGAGATCTTCTTCGACCAGAGCAAG |
| | | AACGGCTACGCCGGCTACATCGACGGCGGCGCCAGCCAGGAGGAGTTCTACAAGTTCATCAAGCCCATCCT |
| | | GGAGAAGATGGACGGCACCGAGGAGCTGCTGGTGAAGCTGAACCGGGAGGACCTGCTGCGGAAGCAGCGG |
| | | ACCTTCGACAACGGCAGCATCCCCCACCAGATCCACCTGGGCGAGCTGCACGCCATCCTGCGGCGGCAGGA |
| | | GGACTTCTACCCCTTCCTGAAGGACAACCGGGAGAAGATCGAGAAGATCCTGACCTTCCGGATCCCCTACTA |
| | | CGTGGGCCCCCTGGCCCGGGGCAACAGCCGGTTCGCCTGGATGACCCGGAAGAGCGAGGAGACCATCACCC |
| | | CCTGGAACTTCGAGGAGGTGGTGGACAAGGGCGCCAGCGCCCAGAGCTTCATCGAGCGGATGACCAACTTC |
| | | GACAAGAACCTGCCCAACGAGAAGGTGCTGCCCAAGCACAGCCTGCTGTACGAGTACTTCACCGTGTACAA |
| | | CGAGCTGACCAAGGTGAAGTACGTGACCGAGGGCATGCGGAAGCCCGCCTTCCTGAGCGGCGAGCAGAAGA |
| | | AGGCCATCGTGGACCTGCTGTTCAAGACCAACCGGAAGGTGACCGTGAAGCAGCTGAAGGAGGACTACTTC |
| | | AAGAAGATCGAGTGCTTCGACAGCGTGGAGATCAGCGGCGTGGAGGACCGGTTCAACGCCAGCCTGGGCAC |
| | | CTACCACGACCTGCTGAAGATCATCAAGGACAAGGACTTCCTGGACAACGAGGAGAACGAGGACATCCTGG |
| | | AGGACATCGTGCTGACCCTGACCCTGTTCGAGGACCGGGAGATGATCGAGGAGCGGCTGAAGACCTACGCC |
| | | CACCTGTTCGACGACAAGGTGATGAAGCAGCTGAAGCGGCGGCGGTACACCGGCTGGGGCCGGCTGAGCCG |
| | | GAAGCTGATCAACGGCATCCGGGACAAGCAGAGCGGCAAGACCATCCTGGACTTCCTGAAGAGCGACGGCT |
| | | TCGCCAACCGGAACTTCATGCAGCTGATCCACGACGACAGCCTGACCTTCAAGGAGGACATCCAGAAGGCC |
| | | CAGGTGAGCGGCCAGGGCGACAGCCTGCACGAGCACATCGCCAACCTGGCCGGCAGCCCCGCCATCAAGAA |
| | | GGGCATCCTGCAGACCGTGAAGGTGGTGGACGAGCTGGTGAAGGTGATGGGCCGGCACAAGCCCGAGAACA |
| | | TCGTGATCGAGATGGCCCGGGAGAACCAGACCACCCAGAAGGGCCAGAAGAACAGCCGGGAGCGGATGAA |
| | | GCGGATCGAGGAGGGCATCAAGGAGCTGGGCAGCCAGATCCTGAAGGAGCACCCCGTGGAGAACACCCAG |
| | | CTGCAGAACGAGAAGCTGTACCTGTACTACCTGCAGAACGGCCGGGACATGTACGTGGACCAGGAGCTGGA |
| | | CATCAACCGGCTGAGCGACTACGACGTGGACCACATCGTGCCCCAGAGCTTCCTGAAGGACGACAGCATCG |
| | | ACAACAAGGTGCTGACCCGGAGCGACAAGAACCGGGGCAAGAGCGACAACGTGCCCAGCGAGGAGGTGGT |
| | | GAAGAAGATGAAGAACTACTGGCGGCAGCTGCTGAACGCCAAGCTGATCACCCAGCGGAAGTTCGACAACC |
| | | TGACCAAGGCCGAGCGGGGCGGCCTGAGCGAGCTGGACAAGGCCGGCTTCATCAAGCGGCAGCTGGTGGAG |
| | | ACCCGGCAGATCACCAAGCACGTGGCCCAGATCCTGGACAGCCGGATGAACACCAAGTACGACGAGAACGA |
| | | CAAGCTGATCCGGGAGGTGAAGGTGATCACCCTGAAGAGCAAGCTGGTGAGCGACTTCCGGAAGGACTTCC |
| | | AGTTCTACAAGGTGCGGGAGATCAACAACTACCACCACGCCCACGACGCCTACCTGAACGCCGTGGTGGGC |
| | | ACCGCCCTGATCAAGAAGTACCCCAAGCTGGAGAGCGAGTTCGTGTACGGCGACTACAAGGTGTACGACGT |
| | | GCGGAAGATGATCGCCAAGAGCGAGCAGGAGATCGGCAAGGCCACCGCCAAGTACTTCTTCTACAGCAACA |
| | | TCATGAACTTCTTCAAGACCGAGATCACCCTGGCCAACGGCGAGATCCGGAAGCGGCCCCTGATCGAGACC |
| | | AACGGCGAGACCGGCGAGATCGTGTGGGACAAGGGCCGGGACTTCGCCACCGTGCGGAAGGTGCTGAGCAT |
| | | GCCCCAGGTGAACATCGTGAAGAAGACCGAGGTGCAGACCGGCGGCTTCAGCAAGGAGAGCATCCTGCCCA |
| | | AGCGGAACAGCGACAAGCTGATCGCCCGGAAGAAGGACTGGGACCCCAAGAAGTACGGCGGCTTCGACAG |
| | | CCCCACCGTGGCCTACAGCGTGCTGGTGGTGGCCAAGGTGGAGAAGGGCAAGAGCAAGAAGCTGAAGAGC |
| | | GTGAAGGAGCTGCTGGGCATCACCATCATGGAGCGGAGCAGCTTCGAGAAGAACCCCATCGACTTCCTGGA |
| | | GGCCAAGGGCTACAAGGAGGTGAAGAAGGACCTGATCATCAAGCTGCCCAAGTACAGCCTGTTCGAGCTGG |
| | | AGAACGGCCGGAAGCGGATGCTGGCCAGCGCCGGCGAGCTGCAGAAGGGCAACGAGCTGGCCCTGCCCAG |
| | | CAAGTACGTGAACTTCCTGTACCTGGCCAGCCACTACGAGAAGCTGAAGGGCAGCCCCGAGGACAACGAGC |
| | | AGAAGCAGCTGTTCGTGGAGCAGCACAAGCACTACCTGGACGAGATCATCGAGCAGATCAGCGAGTTCAGC |
| | | AAGCGGGTGATCCTGGCCGACGCCAACCTGGACAAGGTGCTGAGCGCCTACAACAAGCACCGGGACAAGCC |
| | | CATCCGGGAGCAGGCCGAGAACATCATCCACCTGTTCACCCTGACCAACCTGGGCGCCCCCGCCGCCTTCAA |
| | | GTACTTCGACACCACCATCGACCGGAAGCGGTACACCAGCACCAAGGAGGTGCTGGACGCCACCCTGATCC |
| | | ACCAGAGCATCACCGGCCTGTACGAGACCCGGATCGACCTGAGCCAGCTGGGCGGCGACGGCAGCGGCAGC |
| | | CCCAAGAAGAAGCGGAAGGTGGACGGCAGCCCCAAGAAGAAGCGGAAGGTGGACAGCGGCTGA |
| 1140 | Cas9 ORF | ATGGACAAGAAGTACAGCATCGGCCTGGACATCGGCACCAACAGCGTGGGCTGGGCCGTGATCACCGACGA |
| | | GTACAAGGTGCCCAGCAAGAAGTTCAAGGTGCTGGGCAACACCGACCGGCACAGCATCAAGAAGAACCTGA |
| | | TCGGCGCCCTGCTGTTCGACAGCGGCGAGACCGCCGAGGCCACCCGGCTGAAGCGGACCGCCCGGCGGCGG |
| | | TACACCCGGCGGAAGAACCGGATCTGCTACCTGCAGGAGATCTTCAGCAACGAGATGGCCAAGGTGGACGA |
| | | CAGCTTCTTCCACCGGCTGGAGGAGAGCTTCCTGGTGGAGGAGGACAAGAAGCACGAGCGGCACCCCATCT |
| | | TCGGCAACATCGTGGACGAGGTGGCCTACCACGAGAAGTACCCCACCATCTACCACCTGCGGAAGAAGCTG |
| | | GTGGACAGCACCGACAAGGCCGACCTGCGGCTGATCTACCTGGCCCTGGCCCACATGATCAAGTTCCGGGG |
| | | CCACTTCCTGATCGAGGGCGACCTGAACCCCGACAACAGCGACGTGGACAAGCTGTTCATCCAGCTGGTGCA |
| | | GACCTACAACCAGCTGTTCGAGGAGAACCCCATCAACGCCAGCGGCGTGGACGCCAAGGCCATCCTGAGCG |
| | | CCCGGCTGAGCAAGAGCCGGCGGCTGGAGAACCTGATCGCCCAGCTGCCCGGCGAGAAGAAGAACGGCCTG |
| | | TTCGGCAACCTGATCGCCCTGAGCCTGGGCCTGACCCCCAACTTCAAGAGCAACTTCGACCTGGCCGAGGAC |
| | | GCCAAGCTGCAGCTGAGCAAGGACACCTACGACGACGACCTGGACAACCTGCTGGCCCAGATCGGCGACCA |
| | | GTACGCCGACCTGTTCCTGGCCGCCAAGAACCTGAGCGACGCCATCCTGCTGAGCGACATCCTGCGGGTGAA |
| | | CACCGAGATCACCAAGGCCCCCCTGAGCGCCAGCATGATCAAGCGGTACGACGAGCACCACCAGGACCTGA |
| | | CCCTGCTGAAGGCCCTGGTGCGGCAGCAGCTGCCCGAGAAGTACAAGGAGATCTTCTTCGACCAGAGCAAG |
| | | AACGGCTACGCCGGCTACATCGACGGCGGCGCCAGCCAGGAGGAGTTCTACAAGTTCATCAAGCCCATCCT |
| | | GGAGAAGATGGACGGCACCGAGGAGCTGCTGGTGAAGCTGAACCGGGAGGACCTGCTGCGGAAGCAGCGG |
| | | ACCTTCGACAACGGCAGCATCCCCCACCAGATCCACCTGGGCGAGCTGCACGCCATCCTGCGGCGGCAGGA |
| | | GGACTTCTACCCCTTCCTGAAGGACAACCGGGAGAAGATCGAGAAGATCCTGACCTTCCGGATCCCCTACTA |
| | | CGTGGGCCCCCTGGCCCGGGGCAACAGCCGGTTCGCCTGGATGACCCGGAAGAGCGAGGAGACCATCACCC |
| | | CCTGGAACTTCGAGGAGGTGGTGGACAAGGGCGCCAGCGCCCAGAGCTTCATCGAGCGGATGACCAACTTC |
| | | GACAAGAACCTGCCCAACGAGAAGGTGCTGCCCAAGCACAGCCTGCTGTACGAGTACTTCACCGTGTACAA |
| | | CGAGCTGACCAAGGTGAAGTACGTGACCGAGGGCATGCGGAAGCCCGCCTTCCTGAGCGGCGAGCAGAAGA |
| | | AGGCCATCGTGGACCTGCTGTTCAAGACCAACCGGAAGGTGACCGTGAAGCAGCTGAAGGAGGACTACTTC |
| | | AAGAAGATCGAGTGCTTCGACAGCGTGGAGATCAGCGGCGTGGAGGACCGGTTCAACGCCAGCCTGGGCAC |
| | | CTACCACGACCTGCTGAAGATCATCAAGGACAAGGACTTCCTGGACAACGAGGAGAACGAGGACATCCTGG |
| | | AGGACATCGTGCTGACCCTGACCCTGTTCGAGGACCGGGAGATGATCGAGGAGCGGCTGAAGACCTACGCC |
| | | CACCTGTTCGACGACAAGGTGATGAAGCAGCTGAAGCGGCGGCGGTACACCGGCTGGGGCCGGCTGAGCCG |
| | | GAAGCTGATCAACGGCATCCGGGACAAGCAGAGCGGCAAGACCATCCTGGACTTCCTGAAGAGCGACGGCT |
| | | TCGCCAACCGGAACTTCATGCAGCTGATCCACGACGACAGCCTGACCTTCAAGGAGGACATCCAGAAGGCC |
| | | CAGGTGAGCGGCCAGGGCGACAGCCTGCACGAGCACATCGCCAACCTGGCCGGCAGCCCCGCCATCAAGAA |
| | | GGGCATCCTGCAGACCGTGAAGGTGGTGGACGAGCTGGTGAAGGTGATGGGCCGGCACAAGCCCGAGAACA |
| | | TCGTGATCGAGATGGCCCGGGAGAACCAGACCACCCAGAAGGGCCAGAAGAACAGCCGGGAGCGGATGAA |
| | | GCGGATCGAGGAGGGCATCAAGGAGCTGGGCAGCCAGATCCTGAAGGAGCACCCCGTGGAGAACACCCAG |
| | | CTGCAGAACGAGAAGCTGTACCTGTACTACCTGCAGAACGGCCGGGACATGTACGTGGACCAGGAGCTGGA |
| | | CATCAACCGGCTGAGCGACTACGACGTGGACCACATCGTGCCCCAGAGCTTCCTGAAGGACGACAGCATCG |
| | | ACAACAAGGTGCTGACCCGGAGCGACAAGAACCGGGGCAAGAGCGACAACGTGCCCAGCGAGGAGGTGGT |
| | | GAAGAAGATGAAGAACTACTGGCGGCAGCTGCTGAACGCCAAGCTGATCACCCAGCGGAAGTTCGACAACC |
| | | TGACCAAGGCCGAGCGGGGCGGCCTGAGCGAGCTGGACAAGGCCGGCTTCATCAAGCGGCAGCTGGTGGAG |
| | | ACCCGGCAGATCACCAAGCACGTGGCCCAGATCCTGGACAGCCGGATGAACACCAAGTACGACGAGAACGA |
| | | CAAGCTGATCCGGGAGGTGAAGGTGATCACCCTGAAGAGCAAGCTGGTGAGCGACTTCCGGAAGGACTTCC |
| | | AGTTCTACAAGGTGCGGGAGATCAACAACTACCACCACGCCCACGACGCCTACCTGAACGCCGTGGTGGGC |
| | | ACCGCCCTGATCAAGAAGTACCCCAAGCTGGAGAGCGAGTTCGTGTACGGCGACTACAAGGTGTACGACGT |
| | | GCGGAAGATGATCGCCAAGAGCGAGCAGGAGATCGGCAAGGCCACCGCCAAGTACTTCTTCTACAGCAACA |
| | | TCATGAACTTCTTCAAGACCGAGATCACCCTGGCCAACGGCGAGATCCGGAAGCGGCCCCTGATCGAGACC |
| | | AACGGCGAGACCGGCGAGATCGTGTGGGACAAGGGCCGGGACTTCGCCACCGTGCGGAAGGTGCTGAGCAT |
| | | GCCCCAGGTGAACATCGTGAAGAAGACCGAGGTGCAGACCGGCGGCTTCAGCAAGGAGAGCATCCTGCCCA |
| | | AGCGGAACAGCGACAAGCTGATCGCCCGGAAGAAGGACTGGGACCCCAAGAAGTACGGCGGCTTCGACAG |
| | | CCCCACCGTGGCCTACAGCGTGCTGGTGGTGGCCAAGGTGGAGAAGGGCAAGAGCAAGAAGCTGAAGAGC |
| | | GTGAAGGAGCTGCTGGGCATCACCATCATGGAGCGGAGCAGCTTCGAGAAGAACCCCATCGACTTCCTGGA |
| | | GGCCAAGGGCTACAAGGAGGTGAAGAAGGACCTGATCATCAAGCTGCCCAAGTACAGCCTGTTCGAGCTGG |
| | | AGAACGGCCGGAAGCGGATGCTGGCCAGCGCCGGCGAGCTGCAGAAGGGCAACGAGCTGGCCCTGCCCAG |
| | | CAAGTACGTGAACTTCCTGTACCTGGCCAGCCACTACGAGAAGCTGAAGGGCAGCCCCGAGGACAACGAGC |
| | | AGAAGCAGCTGTTCGTGGAGCAGCACAAGCACTACCTGGACGAGATCATCGAGCAGATCAGCGAGTTCAGC |
| | | AAGCGGGTGATCCTGGCCGACGCCAACCTGGACAAGGTGCTGAGCGCCTACAACAAGCACCGGGACAAGCC |
| | | CATCCGGGAGCAGGCCGAGAACATCATCCACCTGTTCACCCTGACCAACCTGGGCGCCCCCGCCGCCTTCAA |
| | | GTACTTCGACACCACCATCGACCGGAAGCGGTACACCAGCACCAAGGAGGTGCTGGACGCCACCCTGATCC |
| | | ACCAGAGCATCACCGGCCTGTACGAGACCCGGATCGACCTGAGCCAGCTGGGCGGCGACTGA |
| 1141 | Cas9 nickase | ATGGACAAGAAGTACAGCATCGGCCTGGCCATCGGCACCAACAGCGTGGGCTGGGCCGTGATCACCGACGA |
| | ORF | GTACAAGGTGCCCAGCAAGAAGTTCAAGGTGCTGGGCAACACCGACCGGCACAGCATCAAGAAGAACCTGA |
| | | TCGGCGCCCTGCTGTTCGACAGCGGCGAGACCGCCGAGGCCACCCGGCTGAAGCGGACCGCCCGGCGGCGG |
| | | TACACCCGGCGGAAGAACCGGATCTGCTACCTGCAGGAGATCTTCAGCAACGAGATGGCCAAGGTGGACGA |
| | | CAGCTTCTTCCACCGGCTGGAGGAGAGCTTCCTGGTGGAGGAGGACAAGAAGCACGAGCGGCACCCCATCT |
| | | TCGGCAACATCGTGGACGAGGTGGCCTACCACGAGAAGTACCCCACCATCTACCACCTGCGGAAGAAGCTG |
| | | GTGGACAGCACCGACAAGGCCGACCTGCGGCTGATCTACCTGGCCCTGGCCCACATGATCAAGTTCCGGGG |
| | | CCACTTCCTGATCGAGGGCGACCTGAACCCCGACAACAGCGACGTGGACAAGCTGTTCATCCAGCTGGTGCA |
| | | GACCTACAACCAGCTGTTCGAGGAGAACCCCATCAACGCCAGCGGCGTGGACGCCAAGGCCATCCTGAGCG |
| | | CCCGGCTGAGCAAGAGCCGGCGGCTGGAGAACCTGATCGCCCAGCTGCCCGGCGAGAAGAAGAACGGCCTG |
| | | TTCGGCAACCTGATCGCCCTGAGCCTGGGCCTGACCCCCAACTTCAAGAGCAACTTCGACCTGGCCGAGGAC |
| | | GCCAAGCTGCAGCTGAGCAAGGACACCTACGACGACGACCTGGACAACCTGCTGGCCCAGATCGGCGACCA |
| | | GTACGCCGACCTGTTCCTGGCCGCCAAGAACCTGAGCGACGCCATCCTGCTGAGCGACATCCTGCGGGTGAA |
| | | CACCGAGATCACCAAGGCCCCCCTGAGCGCCAGCATGATCAAGCGGTACGACGAGCACCACCAGGACCTGA |
| | | CCCTGCTGAAGGCCCTGGTGCGGCAGCAGCTGCCCGAGAAGTACAAGGAGATCTTCTTCGACCAGAGCAAG |
| | | AACGGCTACGCCGGCTACATCGACGGCGGCGCCAGCCAGGAGGAGTTCTACAAGTTCATCAAGCCCATCCT |
| | | GGAGAAGATGGACGGCACCGAGGAGCTGCTGGTGAAGCTGAACCGGGAGGACCTGCTGCGGAAGCAGCGG |
| | | ACCTTCGACAACGGCAGCATCCCCCACCAGATCCACCTGGGCGAGCTGCACGCCATCCTGCGGCGGCAGGA |
| | | GGACTTCTACCCCTTCCTGAAGGACAACCGGGAGAAGATCGAGAAGATCCTGACCTTCCGGATCCCCTACTA |
| | | CGTGGGCCCCCTGGCCCGGGGCAACAGCCGGTTCGCCTGGATGACCCGGAAGAGCGAGGAGACCATCACCC |
| | | CCTGGAACTTCGAGGAGGTGGTGGACAAGGGCGCCAGCGCCCAGAGCTTCATCGAGCGGATGACCAACTTC |
| | | GACAAGAACCTGCCCAACGAGAAGGTGCTGCCCAAGCACAGCCTGCTGTACGAGTACTTCACCGTGTACAA |
| | | CGAGCTGACCAAGGTGAAGTACGTGACCGAGGGCATGCGGAAGCCCGCCTTCCTGAGCGGCGAGCAGAAGA |
| | | AGGCCATCGTGGACCTGCTGTTCAAGACCAACCGGAAGGTGACCGTGAAGCAGCTGAAGGAGGACTACTTC |
| | | AAGAAGATCGAGTGCTTCGACAGCGTGGAGATCAGCGGCGTGGAGGACCGGTTCAACGCCAGCCTGGGCAC |
| | | CTACCACGACCTGCTGAAGATCATCAAGGACAAGGACTTCCTGGACAACGAGGAGAACGAGGACATCCTGG |
| | | AGGACATCGTGCTGACCCTGACCCTGTTCGAGGACCGGGAGATGATCGAGGAGCGGCTGAAGACCTACGCC |
| | | CACCTGTTCGACGACAAGGTGATGAAGCAGCTGAAGCGGCGGCGGTACACCGGCTGGGGCCGGCTGAGCCG |
| | | GAAGCTGATCAACGGCATCCGGGACAAGCAGAGCGGCAAGACCATCCTGGACTTCCTGAAGAGCGACGGCT |
| | | TCGCCAACCGGAACTTCATGCAGCTGATCCACGACGACAGCCTGACCTTCAAGGAGGACATCCAGAAGGCC |
| | | CAGGTGAGCGGCCAGGGCGACAGCCTGCACGAGCACATCGCCAACCTGGCCGGCAGCCCCGCCATCAAGAA |
| | | GGGCATCCTGCAGACCGTGAAGGTGGTGGACGAGCTGGTGAAGGTGATGGGCCGGCACAAGCCCGAGAACA |
| | | TCGTGATCGAGATGGCCCGGGAGAACCAGACCACCCAGAAGGGCCAGAAGAACAGCCGGGAGCGGATGAA |
| | | GCGGATCGAGGAGGGCATCAAGGAGCTGGGCAGCCAGATCCTGAAGGAGCACCCCGTGGAGAACACCCAG |
| | | CTGCAGAACGAGAAGCTGTACCTGTACTACCTGCAGAACGGCCGGGACATGTACGTGGACCAGGAGCTGGA |
| | | CATCAACCGGCTGAGCGACTACGACGTGGACCACATCGTGCCCCAGAGCTTCCTGAAGGACGACAGCATCG |
| | | ACAACAAGGTGCTGACCCGGAGCGACAAGAACCGGGGCAAGAGCGACAACGTGCCCAGCGAGGAGGTGGT |
| | | GAAGAAGATGAAGAACTACTGGCGGCAGCTGCTGAACGCCAAGCTGATCACCCAGCGGAAGTTCGACAACC |
| | | TGACCAAGGCCGAGCGGGGCGGCCTGAGCGAGCTGGACAAGGCCGGCTTCATCAAGCGGCAGCTGGTGGAG |
| | | ACCCGGCAGATCACCAAGCACGTGGCCCAGATCCTGGACAGCCGGATGAACACCAAGTACGACGAGAACGA |
| | | CAAGCTGATCCGGGAGGTGAAGGTGATCACCCTGAAGAGCAAGCTGGTGAGCGACTTCCGGAAGGACTTCC |
| | | AGTTCTACAAGGTGCGGGAGATCAACAACTACCACCACGCCCACGACGCCTACCTGAACGCCGTGGTGGGC |
| | | ACCGCCCTGATCAAGAAGTACCCCAAGCTGGAGAGCGAGTTCGTGTACGGCGACTACAAGGTGTACGACGT |
| | | GCGGAAGATGATCGCCAAGAGCGAGCAGGAGATCGGCAAGGCCACCGCCAAGTACTTCTTCTACAGCAACA |
| | | TCATGAACTTCTTCAAGACCGAGATCACCCTGGCCAACGGCGAGATCCGGAAGCGGCCCCTGATCGAGACC |
| | | AACGGCGAGACCGGCGAGATCGTGTGGGACAAGGGCCGGGACTTCGCCACCGTGCGGAAGGTGCTGAGCAT |
| | | GCCCCAGGTGAACATCGTGAAGAAGACCGAGGTGCAGACCGGCGGCTTCAGCAAGGAGAGCATCCTGCCCA |
| | | AGCGGAACAGCGACAAGCTGATCGCCCGGAAGAAGGACTGGGACCCCAAGAAGTACGGCGGCTTCGACAG |
| | | CCCCACCGTGGCCTACAGCGTGCTGGTGGTGGCCAAGGTGGAGAAGGGCAAGAGCAAGAAGCTGAAGAGC |
| | | GTGAAGGAGCTGCTGGGCATCACCATCATGGAGCGGAGCAGCTTCGAGAAGAACCCCATCGACTTCCTGGA |
| | | GGCCAAGGGCTACAAGGAGGTGAAGAAGGACCTGATCATCAAGCTGCCCAAGTACAGCCTGTTCGAGCTGG |
| | | AGAACGGCCGGAAGCGGATGCTGGCCAGCGCCGGCGAGCTGCAGAAGGGCAACGAGCTGGCCCTGCCCAG |
| | | CAAGTACGTGAACTTCCTGTACCTGGCCAGCCACTACGAGAAGCTGAAGGGCAGCCCCGAGGACAACGAGC |
| | | AGAAGCAGCTGTTCGTGGAGCAGCACAAGCACTACCTGGACGAGATCATCGAGCAGATCAGCGAGTTCAGC |
| | | AAGCGGGTGATCCTGGCCGACGCCAACCTGGACAAGGTGCTGAGCGCCTACAACAAGCACCGGGACAAGCC |
| | | CATCCGGGAGCAGGCCGAGAACATCATCCACCTGTTCACCCTGACCAACCTGGGCGCCCCCGCCGCCTTCAA |
| | | GTACTTCGACACCACCATCGACCGGAAGCGGTACACCAGCACCAAGGAGGTGCTGGACGCCACCCTGATCC |
| | | ACCAGAGCATCACCGGCCTGTACGAGACCCGGATCGACCTGAGCCAGCTGGGCGGCGACGGCGGCGGCAGC |
| | | CCCAAGAAGAAGCGGAAGGTGTGA |
| 1142 | Cas9 nickase | ATGGACAAGAAGTACAGCATCGGCCTGGCCATCGGCACCAACAGCGTGGGCTGGGCCGTGATCACCGACGA |
| | ORF | GTACAAGGTGCCCAGCAAGAAGTTCAAGGTGCTGGGCAACACCGACCGGCACAGCATCAAGAAGAACCTGA |
| | | TCGGCGCCCTGCTGTTCGACAGCGGCGAGACCGCCGAGGCCACCCGGCTGAAGCGGACCGCCCGGCGGCGG |
| | | TACACCCGGCGGAAGAACCGGATCTGCTACCTGCAGGAGATCTTCAGCAACGAGATGGCCAAGGTGGACGA |
| | | CAGCTTCTTCCACCGGCTGGAGGAGAGCTTCCTGGTGGAGGAGGACAAGAAGCACGAGCGGCACCCCATCT |
| | | TCGGCAACATCGTGGACGAGGTGGCCTACCACGAGAAGTACCCCACCATCTACCACCTGCGGAAGAAGCTG |
| | | GTGGACAGCACCGACAAGGCCGACCTGCGGCTGATCTACCTGGCCCTGGCCCACATGATCAAGTTCCGGGG |
| | | CCACTTCCTGATCGAGGGCGACCTGAACCCCGACAACAGCGACGTGGACAAGCTGTTCATCCAGCTGGTGCA |
| | | GACCTACAACCAGCTGTTCGAGGAGAACCCCATCAACGCCAGCGGCGTGGACGCCAAGGCCATCCTGAGCG |
| | | CCCGGCTGAGCAAGAGCCGGCGGCTGGAGAACCTGATCGCCCAGCTGCCCGGCGAGAAGAAGAACGGCCTG |
| | | TTCGGCAACCTGATCGCCCTGAGCCTGGGCCTGACCCCCAACTTCAAGAGCAACTTCGACCTGGCCGAGGAC |
| | | GCCAAGCTGCAGCTGAGCAAGGACACCTACGACGACGACCTGGACAACCTGCTGGCCCAGATCGGCGACCA |
| | | GTACGCCGACCTGTTCCTGGCCGCCAAGAACCTGAGCGACGCCATCCTGCTGAGCGACATCCTGCGGGTGAA |
| | | CACCGAGATCACCAAGGCCCCCCTGAGCGCCAGCATGATCAAGCGGTACGACGAGCACCACCAGGACCTGA |
| | | CCCTGCTGAAGGCCCTGGTGCGGCAGCAGCTGCCCGAGAAGTACAAGGAGATCTTCTTCGACCAGAGCAAG |
| | | AACGGCTACGCCGGCTACATCGACGGCGGCGCCAGCCAGGAGGAGTTCTACAAGTTCATCAAGCCCATCCT |
| | | GGAGAAGATGGACGGCACCGAGGAGCTGCTGGTGAAGCTGAACCGGGAGGACCTGCTGCGGAAGCAGCGG |
| | | ACCTTCGACAACGGCAGCATCCCCCACCAGATCCACCTGGGCGAGCTGCACGCCATCCTGCGGCGGCAGGA |
| | | GGACTTCTACCCCTTCCTGAAGGACAACCGGGAGAAGATCGAGAAGATCCTGACCTTCCGGATCCCCTACTA |
| | | CGTGGGCCCCCTGGCCCGGGGCAACAGCCGGTTCGCCTGGATGACCCGGAAGAGCGAGGAGACCATCACCC |
| | | CCTGGAACTTCGAGGAGGTGGTGGACAAGGGCGCCAGCGCCCAGAGCTTCATCGAGCGGATGACCAACTTC |
| | | GACAAGAACCTGCCCAACGAGAAGGTGCTGCCCAAGCACAGCCTGCTGTACGAGTACTTCACCGTGTACAA |
| | | CGAGCTGACCAAGGTGAAGTACGTGACCGAGGGCATGCGGAAGCCCGCCTTCCTGAGCGGCGAGCAGAAGA |
| | | AGGCCATCGTGGACCTGCTGTTCAAGACCAACCGGAAGGTGACCGTGAAGCAGCTGAAGGAGGACTACTTC |
| | | AAGAAGATCGAGTGCTTCGACAGCGTGGAGATCAGCGGCGTGGAGGACCGGTTCAACGCCAGCCTGGGCAC |
| | | CTACCACGACCTGCTGAAGATCATCAAGGACAAGGACTTCCTGGACAACGAGGAGAACGAGGACATCCTGG |
| | | AGGACATCGTGCTGACCCTGACCCTGTTCGAGGACCGGGAGATGATCGAGGAGCGGCTGAAGACCTACGCC |
| | | CACCTGTTCGACGACAAGGTGATGAAGCAGCTGAAGCGGCGGCGGTACACCGGCTGGGGCCGGCTGAGCCG |
| | | GAAGCTGATCAACGGCATCCGGGACAAGCAGAGCGGCAAGACCATCCTGGACTTCCTGAAGAGCGACGGCT |
| | | TCGCCAACCGGAACTTCATGCAGCTGATCCACGACGACAGCCTGACCTTCAAGGAGGACATCCAGAAGGCC |
| | | CAGGTGAGCGGCCAGGGCGACAGCCTGCACGAGCACATCGCCAACCTGGCCGGCAGCCCCGCCATCAAGAA |
| | | GGGCATCCTGCAGACCGTGAAGGTGGTGGACGAGCTGGTGAAGGTGATGGGCCGGCACAAGCCCGAGAACA |
| | | TCGTGATCGAGATGGCCCGGGAGAACCAGACCACCCAGAAGGGCCAGAAGAACAGCCGGGAGCGGATGAA |
| | | GCGGATCGAGGAGGGCATCAAGGAGCTGGGCAGCCAGATCCTGAAGGAGCACCCCGTGGAGAACACCCAG |
| | | CTGCAGAACGAGAAGCTGTACCTGTACTACCTGCAGAACGGCCGGGACATGTACGTGGACCAGGAGCTGGA |
| | | CATCAACCGGCTGAGCGACTACGACGTGGACCACATCGTGCCCCAGAGCTTCCTGAAGGACGACAGCATCG |
| | | ACAACAAGGTGCTGACCCGGAGCGACAAGAACCGGGGCAAGAGCGACAACGTGCCCAGCGAGGAGGTGGT |
| | | GAAGAAGATGAAGAACTACTGGCGGCAGCTGCTGAACGCCAAGCTGATCACCCAGCGGAAGTTCGACAACC |
| | | TGACCAAGGCCGAGCGGGGCGGCCTGAGCGAGCTGGACAAGGCCGGCTTCATCAAGCGGCAGCTGGTGGAG |
| | | ACCCGGCAGATCACCAAGCACGTGGCCCAGATCCTGGACAGCCGGATGAACACCAAGTACGACGAGAACGA |
| | | CAAGCTGATCCGGGAGGTGAAGGTGATCACCCTGAAGAGCAAGCTGGTGAGCGACTTCCGGAAGGACTTCC |
| | | AGTTCTACAAGGTGCGGGAGATCAACAACTACCACCACGCCCACGACGCCTACCTGAACGCCGTGGTGGGC |
| | | ACCGCCCTGATCAAGAAGTACCCCAAGCTGGAGAGCGAGTTCGTGTACGGCGACTACAAGGTGTACGACGT |
| | | GCGGAAGATGATCGCCAAGAGCGAGCAGGAGATCGGCAAGGCCACCGCCAAGTACTTCTTCTACAGCAACA |
| | | TCATGAACTTCTTCAAGACCGAGATCACCCTGGCCAACGGCGAGATCCGGAAGCGGCCCCTGATCGAGACC |
| | | AACGGCGAGACCGGCGAGATCGTGTGGGACAAGGGCCGGGACTTCGCCACCGTGCGGAAGGTGCTGAGCAT |
| | | GCCCCAGGTGAACATCGTGAAGAAGACCGAGGTGCAGACCGGCGGCTTCAGCAAGGAGAGCATCCTGCCCA |
| | | AGCGGAACAGCGACAAGCTGATCGCCCGGAAGAAGGACTGGGACCCCAAGAAGTACGGCGGCTTCGACAG |
| | | CCCCACCGTGGCCTACAGCGTGCTGGTGGTGGCCAAGGTGGAGAAGGGCAAGAGCAAGAAGCTGAAGAGC |
| | | GTGAAGGAGCTGCTGGGCATCACCATCATGGAGCGGAGCAGCTTCGAGAAGAACCCCATCGACTTCCTGGA |
| | | GGCCAAGGGCTACAAGGAGGTGAAGAAGGACCTGATCATCAAGCTGCCCAAGTACAGCCTGTTCGAGCTGG |
| | | AGAACGGCCGGAAGCGGATGCTGGCCAGCGCCGGCGAGCTGCAGAAGGGCAACGAGCTGGCCCTGCCCAG |
| | | CAAGTACGTGAACTTCCTGTACCTGGCCAGCCACTACGAGAAGCTGAAGGGCAGCCCCGAGGACAACGAGC |
| | | AGAAGCAGCTGTTCGTGGAGCAGCACAAGCACTACCTGGACGAGATCATCGAGCAGATCAGCGAGTTCAGC |
| | | AAGCGGGTGATCCTGGCCGACGCCAACCTGGACAAGGTGCTGAGCGCCTACAACAAGCACCGGGACAAGCC |
| | | CATCCGGGAGCAGGCCGAGAACATCATCCACCTGTTCACCCTGACCAACCTGGGCGCCCCCGCCGCCTTCAA |
| | | GTACTTCGACACCACCATCGACCGGAAGCGGTACACCAGCACCAAGGAGGTGCTGGACGCCACCCTGATCC |
| | | ACCAGAGCATCACCGGCCTGTACGAGACCCGGATCGACCTGAGCCAGCTGGGCGGCGACGGCAGCGGCAGC |
| | | CCCAAGAAGAAGCGGAAGGTGGACGGCAGCCCCAAGAAGAAGCGGAAGGTGGACAGCGGCTGA |
| 1143 | Cas9 nickase | ATGGACAAGAAGTACAGCATCGGCCTGGcCATCGGCACCAACAGCGTGGGCTGGGCCGTGATCACCGACGA |
| | ORF | GTACAAGGTGCCCAGCAAGAAGTTCAAGGTGCTGGGCAACACCGACCGGCACAGCATCAAGAAGAACCTGA |
| | | TCGGCGCCCTGCTGTTCGACAGCGGCGAGACCGCCGAGGCCACCCGGCTGAAGCGGACCGCCCGGCGGCGG |
| | | TACACCCGGCGGAAGAACCGGATCTGCTACCTGCAGGAGATCTTCAGCAACGAGATGGCCAAGGTGGACGA |
| | | CAGCTTCTTCCACCGGCTGGAGGAGAGCTTCCTGGTGGAGGAGGACAAGAAGCACGAGCGGCACCCCATCT |
| | | TCGGCAACATCGTGGACGAGGTGGCCTACCACGAGAAGTACCCCACCATCTACCACCTGCGGAAGAAGCTG |
| | | GTGGACAGCACCGACAAGGCCGACCTGCGGCTGATCTACCTGGCCCTGGCCCACATGATCAAGTTCCGGGG |
| | | CCACTTCCTGATCGAGGGCGACCTGAACCCCGACAACAGCGACGTGGACAAGCTGTTCATCCAGCTGGTGCA |
| | | GACCTACAACCAGCTGTTCGAGGAGAACCCCATCAACGCCAGCGGCGTGGACGCCAAGGCCATCCTGAGCG |
| | | CCCGGCTGAGCAAGAGCCGGCGGCTGGAGAACCTGATCGCCCAGCTGCCCGGCGAGAAGAAGAACGGCCTG |
| | | TTCGGCAACCTGATCGCCCTGAGCCTGGGCCTGACCCCCAACTTCAAGAGCAACTTCGACCTGGCCGAGGAC |
| | | GCCAAGCTGCAGCTGAGCAAGGACACCTACGACGACGACCTGGACAACCTGCTGGCCCAGATCGGCGACCA |
| | | GTACGCCGACCTGTTCCTGGCCGCCAAGAACCTGAGCGACGCCATCCTGCTGAGCGACATCCTGCGGGTGAA |
| | | CACCGAGATCACCAAGGCCCCCCTGAGCGCCAGCATGATCAAGCGGTACGACGAGCACCACCAGGACCTGA |
| | | CCCTGCTGAAGGCCCTGGTGCGGCAGCAGCTGCCCGAGAAGTACAAGGAGATCTTCTTCGACCAGAGCAAG |
| | | AACGGCTACGCCGGCTACATCGACGGCGGCGCCAGCCAGGAGGAGTTCTACAAGTTCATCAAGCCCATCCT |
| | | GGAGAAGATGGACGGCACCGAGGAGCTGCTGGTGAAGCTGAACCGGGAGGACCTGCTGCGGAAGCAGCGG |
| | | ACCTTCGACAACGGCAGCATCCCCCACCAGATCCACCTGGGCGAGCTGCACGCCATCCTGCGGCGGCAGGA |
| | | GGACTTCTACCCCTTCCTGAAGGACAACCGGGAGAAGATCGAGAAGATCCTGACCTTCCGGATCCCCTACTA |
| | | CGTGGGCCCCCTGGCCCGGGGCAACAGCCGGTTCGCCTGGATGACCCGGAAGAGCGAGGAGACCATCACCC |
| | | CCTGGAACTTCGAGGAGGTGGTGGACAAGGGCGCCAGCGCCCAGAGCTTCATCGAGCGGATGACCAACTTC |
| | | GACAAGAACCTGCCCAACGAGAAGGTGCTGCCCAAGCACAGCCTGCTGTACGAGTACTTCACCGTGTACAA |
| | | CGAGCTGACCAAGGTGAAGTACGTGACCGAGGGCATGCGGAAGCCCGCCTTCCTGAGCGGCGAGCAGAAGA |
| | | AGGCCATCGTGGACCTGCTGTTCAAGACCAACCGGAAGGTGACCGTGAAGCAGCTGAAGGAGGACTACTTC |
| | | AAGAAGATCGAGTGCTTCGACAGCGTGGAGATCAGCGGCGTGGAGGACCGGTTCAACGCCAGCCTGGGCAC |
| | | CTACCACGACCTGCTGAAGATCATCAAGGACAAGGACTTCCTGGACAACGAGGAGAACGAGGACATCCTGG |
| | | AGGACATCGTGCTGACCCTGACCCTGTTCGAGGACCGGGAGATGATCGAGGAGCGGCTGAAGACCTACGCC |
| | | CACCTGTTCGACGACAAGGTGATGAAGCAGCTGAAGCGGCGGCGGTACACCGGCTGGGGCCGGCTGAGCCG |
| | | GAAGCTGATCAACGGCATCCGGGACAAGCAGAGCGGCAAGACCATCCTGGACTTCCTGAAGAGCGACGGCT |
| | | TCGCCAACCGGAACTTCATGCAGCTGATCCACGACGACAGCCTGACCTTCAAGGAGGACATCCAGAAGGCC |
| | | CAGGTGAGCGGCCAGGGCGACAGCCTGCACGAGCACATCGCCAACCTGGCCGGCAGCCCCGCCATCAAGAA |
| | | GGGCATCCTGCAGACCGTGAAGGTGGTGGACGAGCTGGTGAAGGTGATGGGCCGGCACAAGCCCGAGAACA |
| | | TCGTGATCGAGATGGCCCGGGAGAACCAGACCACCCAGAAGGGCCAGAAGAACAGCCGGGAGCGGATGAA |
| | | GCGGATCGAGGAGGGCATCAAGGAGCTGGGCAGCCAGATCCTGAAGGAGCACCCCGTGGAGAACACCCAG |
| | | CTGCAGAACGAGAAGCTGTACCTGTACTACCTGCAGAACGGCCGGGACATGTACGTGGACCAGGAGCTGGA |
| | | CATCAACCGGCTGAGCGACTACGACGTGGACCACATCGTGCCCCAGAGCTTCCTGAAGGACGACAGCATCG |
| | | ACAACAAGGTGCTGACCCGGAGCGACAAGAACCGGGGCAAGAGCGACAACGTGCCCAGCGAGGAGGTGGT |
| | | GAAGAAGATGAAGAACTACTGGCGGCAGCTGCTGAACGCCAAGCTGATCACCCAGCGGAAGTTCGACAACC |
| | | TGACCAAGGCCGAGCGGGGCGGCCTGAGCGAGCTGGACAAGGCCGGCTTCATCAAGCGGCAGCTGGTGGAG |
| | | ACCCGGCAGATCACCAAGCACGTGGCCCAGATCCTGGACAGCCGGATGAACACCAAGTACGACGAGAACGA |
| | | CAAGCTGATCCGGGAGGTGAAGGTGATCACCCTGAAGAGCAAGCTGGTGAGCGACTTCCGGAAGGACTTCC |
| | | AGTTCTACAAGGTGCGGGAGATCAACAACTACCACCACGCCCACGACGCCTACCTGAACGCCGTGGTGGGC |
| | | ACCGCCCTGATCAAGAAGTACCCCAAGCTGGAGAGCGAGTTCGTGTACGGCGACTACAAGGTGTACGACGT |
| | | GCGGAAGATGATCGCCAAGAGCGAGCAGGAGATCGGCAAGGCCACCGCCAAGTACTTCTTCTACAGCAACA |
| | | TCATGAACTTCTTCAAGACCGAGATCACCCTGGCCAACGGCGAGATCCGGAAGCGGCCCCTGATCGAGACC |
| | | AACGGCGAGACCGGCGAGATCGTGTGGGACAAGGGCCGGGACTTCGCCACCGTGCGGAAGGTGCTGAGCAT |
| | | GCCCCAGGTGAACATCGTGAAGAAGACCGAGGTGCAGACCGGCGGCTTCAGCAAGGAGAGCATCCTGCCCA |
| | | AGCGGAACAGCGACAAGCTGATCGCCCGGAAGAAGGACTGGGACCCCAAGAAGTACGGCGGCTTCGACAG |
| | | CCCCACCGTGGCCTACAGCGTGCTGGTGGTGGCCAAGGTGGAGAAGGGCAAGAGCAAGAAGCTGAAGAGC |
| | | GTGAAGGAGCTGCTGGGCATCACCATCATGGAGCGGAGCAGCTTCGAGAAGAACCCCATCGACTTCCTGGA |
| | | GGCCAAGGGCTACAAGGAGGTGAAGAAGGACCTGATCATCAAGCTGCCCAAGTACAGCCTGTTCGAGCTGG |
| | | AGAACGGCCGGAAGCGGATGCTGGCCAGCGCCGGCGAGCTGCAGAAGGGCAACGAGCTGGCCCTGCCCAG |
| | | CAAGTACGTGAACTTCCTGTACCTGGCCAGCCACTACGAGAAGCTGAAGGGCAGCCCCGAGGACAACGAGC |
| | | AGAAGCAGCTGTTCGTGGAGCAGCACAAGCACTACCTGGACGAGATCATCGAGCAGATCAGCGAGTTCAGC |
| | | AAGCGGGTGATCCTGGCCGACGCCAACCTGGACAAGGTGCTGAGCGCCTACAACAAGCACCGGGACAAGCC |
| | | CATCCGGGAGCAGGCCGAGAACATCATCCACCTGTTCACCCTGACCAACCTGGGCGCCCCCGCCGCCTTCAA |
| | | GTACTTCGACACCACCATCGACCGGAAGCGGTACACCAGCACCAAGGAGGTGCTGGACGCCACCCTGATCC |
| | | ACCAGAGCATCACCGGCCTGTACGAGACCCGGATCGACCTGAGCCAGCTGGGCGGCGACTGA |
| 1144 | dCas9 ORF | ATGGACAAGAAGTACAGCATCGGCCTGGcCATCGGCACCAACAGCGTGGGCTGGGCCGTGATCACCGACGA |
| | | GTACAAGGTGCCCAGCAAGAAGTTCAAGGTGCTGGGCAACACCGACCGGCACAGCATCAAGAAGAACCTGA |
| | | TCGGCGCCCTGCTGTTCGACAGCGGCGAGACCGCCGAGGCCACCCGGCTGAAGCGGACCGCCCGGCGGCGG |
| | | TACACCCGGCGGAAGAACCGGATCTGCTACCTGCAGGAGATCTTCAGCAACGAGATGGCCAAGGTGGACGA |
| | | CAGCTTCTTCCACCGGCTGGAGGAGAGCTTCCTGGTGGAGGAGGACAAGAAGCACGAGCGGCACCCCATCT |
| | | TCGGCAACATCGTGGACGAGGTGGCCTACCACGAGAAGTACCCCACCATCTACCACCTGCGGAAGAAGCTG |
| | | GTGGACAGCACCGACAAGGCCGACCTGCGGCTGATCTACCTGGCCCTGGCCCACATGATCAAGTTCCGGGG |
| | | CCACTTCCTGATCGAGGGCGACCTGAACCCCGACAACAGCGACGTGGACAAGCTGTTCATCCAGCTGGTGCA |
| | | GACCTACAACCAGCTGTTCGAGGAGAACCCCATCAACGCCAGCGGCGTGGACGCCAAGGCCATCCTGAGCG |
| | | CCCGGCTGAGCAAGAGCCGGCGGCTGGAGAACCTGATCGCCCAGCTGCCCGGCGAGAAGAAGAACGGCCTG |
| | | TTCGGCAACCTGATCGCCCTGAGCCTGGGCCTGACCCCCAACTTCAAGAGCAACTTCGACCTGGCCGAGGAC |
| | | GCCAAGCTGCAGCTGAGCAAGGACACCTACGACGACGACCTGGACAACCTGCTGGCCCAGATCGGCGACCA |
| | | GTACGCCGACCTGTTCCTGGCCGCCAAGAACCTGAGCGACGCCATCCTGCTGAGCGACATCCTGCGGGTGAA |
| | | CACCGAGATCACCAAGGCCCCCCTGAGCGCCAGCATGATCAAGCGGTACGACGAGCACCACCAGGACCTGA |
| | | CCCTGCTGAAGGCCCTGGTGCGGCAGCAGCTGCCCGAGAAGTACAAGGAGATCTTCTTCGACCAGAGCAAG |
| | | AACGGCTACGCCGGCTACATCGACGGCGGCGCCAGCCAGGAGGAGTTCTACAAGTTCATCAAGCCCATCCT |
| | | GGAGAAGATGGACGGCACCGAGGAGCTGCTGGTGAAGCTGAACCGGGAGGACCTGCTGCGGAAGCAGCGG |
| | | ACCTTCGACAACGGCAGCATCCCCCACCAGATCCACCTGGGCGAGCTGCACGCCATCCTGCGGCGGCAGGA |
| | | GGACTTCTACCCCTTCCTGAAGGACAACCGGGAGAAGATCGAGAAGATCCTGACCTTCCGGATCCCCTACTA |
| | | CGTGGGCCCCCTGGCCCGGGGCAACAGCCGGTTCGCCTGGATGACCCGGAAGAGCGAGGAGACCATCACCC |
| | | CCTGGAACTTCGAGGAGGTGGTGGACAAGGGCGCCAGCGCCCAGAGCTTCATCGAGCGGATGACCAACTTC |
| | | GACAAGAACCTGCCCAACGAGAAGGTGCTGCCCAAGCACAGCCTGCTGTACGAGTACTTCACCGTGTACAA |
| | | CGAGCTGACCAAGGTGAAGTACGTGACCGAGGGCATGCGGAAGCCCGCCTTCCTGAGCGGCGAGCAGAAGA |
| | | AGGCCATCGTGGACCTGCTGTTCAAGACCAACCGGAAGGTGACCGTGAAGCAGCTGAAGGAGGACTACTTC |
| | | AAGAAGATCGAGTGCTTCGACAGCGTGGAGATCAGCGGCGTGGAGGACCGGTTCAACGCCAGCCTGGGCAC |
| | | CTACCACGACCTGCTGAAGATCATCAAGGACAAGGACTTCCTGGACAACGAGGAGAACGAGGACATCCTGG |
| | | AGGACATCGTGCTGACCCTGACCCTGTTCGAGGACCGGGAGATGATCGAGGAGCGGCTGAAGACCTACGCC |
| | | CACCTGTTCGACGACAAGGTGATGAAGCAGCTGAAGCGGCGGCGGTACACCGGCTGGGGCCGGCTGAGCCG |
| | | GAAGCTGATCAACGGCATCCGGGACAAGCAGAGCGGCAAGACCATCCTGGACTTCCTGAAGAGCGACGGCT |
| | | TCGCCAACCGGAACTTCATGCAGCTGATCCACGACGACAGCCTGACCTTCAAGGAGGACATCCAGAAGGCC |
| | | CAGGTGAGCGGCCAGGGCGACAGCCTGCACGAGCACATCGCCAACCTGGCCGGCAGCCCCGCCATCAAGAA |
| | | GGGCATCCTGCAGACCGTGAAGGTGGTGGACGAGCTGGTGAAGGTGATGGGCCGGCACAAGCCCGAGAACA |
| | | TCGTGATCGAGATGGCCCGGGAGAACCAGACCACCCAGAAGGGCCAGAAGAACAGCCGGGAGCGGATGAA |
| | | GCGGATCGAGGAGGGCATCAAGGAGCTGGGCAGCCAGATCCTGAAGGAGCACCCCGTGGAGAACACCCAG |
| | | CTGCAGAACGAGAAGCTGTACCTGTACTACCTGCAGAACGGCCGGGACATGTACGTGGACCAGGAGCTGGA |
| | | CATCAACCGGCTGAGCGACTACGACGTGGACgcCATCGTGCCCCAGAGCTTCCTGAAGGACGACAGCATCGA |
| | | CAACAAGGTGCTGACCCGGAGCGACAAGAACCGGGGCAAGAGCGACAACGTGCCCAGCGAGGAGGTGGTG |
| | | AAGAAGATGAAGAACTACTGGCGGCAGCTGCTGAACGCCAAGCTGATCACCCAGCGGAAGTTCGACAACCT |
| | | GACCAAGGCCGAGCGGGGCGGCCTGAGCGAGCTGGACAAGGCCGGCTTCATCAAGCGGCAGCTGGTGGAG |
| | | ACCCGGCAGATCACCAAGCACGTGGCCCAGATCCTGGACAGCCGGATGAACACCAAGTACGACGAGAACGA |
| | | CAAGCTGATCCGGGAGGTGAAGGTGATCACCCTGAAGAGCAAGCTGGTGAGCGACTTCCGGAAGGACTTCC |
| | | AGTTCTACAAGGTGCGGGAGATCAACAACTACCACCACGCCCACGACGCCTACCTGAACGCCGTGGTGGGC |
| | | ACCGCCCTGATCAAGAAGTACCCCAAGCTGGAGAGCGAGTTCGTGTACGGCGACTACAAGGTGTACGACGT |
| | | GCGGAAGATGATCGCCAAGAGCGAGCAGGAGATCGGCAAGGCCACCGCCAAGTACTTCTTCTACAGCAACA |
| | | TCATGAACTTCTTCAAGACCGAGATCACCCTGGCCAACGGCGAGATCCGGAAGCGGCCCCTGATCGAGACC |
| | | AACGGCGAGACCGGCGAGATCGTGTGGGACAAGGGCCGGGACTTCGCCACCGTGCGGAAGGTGCTGAGCAT |
| | | GCCCCAGGTGAACATCGTGAAGAAGACCGAGGTGCAGACCGGCGGCTTCAGCAAGGAGAGCATCCTGCCCA |
| | | AGCGGAACAGCGACAAGCTGATCGCCCGGAAGAAGGACTGGGACCCCAAGAAGTACGGCGGCTTCGACAG |
| | | CCCCACCGTGGCCTACAGCGTGCTGGTGGTGGCCAAGGTGGAGAAGGGCAAGAGCAAGAAGCTGAAGAGC |
| | | GTGAAGGAGCTGCTGGGCATCACCATCATGGAGCGGAGCAGCTTCGAGAAGAACCCCATCGACTTCCTGGA |
| | | GGCCAAGGGCTACAAGGAGGTGAAGAAGGACCTGATCATCAAGCTGCCCAAGTACAGCCTGTTCGAGCTGG |
| | | AGAACGGCCGGAAGCGGATGCTGGCCAGCGCCGGCGAGCTGCAGAAGGGCAACGAGCTGGCCCTGCCCAG |
| | | CAAGTACGTGAACTTCCTGTACCTGGCCAGCCACTACGAGAAGCTGAAGGGCAGCCCCGAGGACAACGAGC |
| | | AGAAGCAGCTGTTCGTGGAGCAGCACAAGCACTACCTGGACGAGATCATCGAGCAGATCAGCGAGTTCAGC |
| | | AAGCGGGTGATCCTGGCCGACGCCAACCTGGACAAGGTGCTGAGCGCCTACAACAAGCACCGGGACAAGCC |
| | | CATCCGGGAGCAGGCCGAGAACATCATCCACCTGTTCACCCTGACCAACCTGGGCGCCCCCGCCGCCTTCAA |
| | | GTACTTCGACACCACCATCGACCGGAAGCGGTACACCAGCACCAAGGAGGTGCTGGACGCCACCCTGATCC |
| | | ACCAGAGCATCACCGGCCTGTACGAGACCCGGATCGACCTGAGCCAGCTGGGCGGCGACGGCGGCGGCAGC |
| | | CCCAAGAAGAAGCGGAAGGTGTGA |
| 1145 | dCas9 ORF | ATGGACAAGAAGTACAGCATCGGCCTGGCCATCGGCACCAACAGCGTGGGCTGGGCCGTGATCACCGACGA |
| | | GTACAAGGTGCCCAGCAAGAAGTTCAAGGTGCTGGGCAACACCGACCGGCACAGCATCAAGAAGAACCTGA |
| | | TCGGCGCCCTGCTGTTCGACAGCGGCGAGACCGCCGAGGCCACCCGGCTGAAGCGGACCGCCCGGCGGCGG |
| | | TACACCCGGCGGAAGAACCGGATCTGCTACCTGCAGGAGATCTTCAGCAACGAGATGGCCAAGGTGGACGA |
| | | CAGCTTCTTCCACCGGCTGGAGGAGAGCTTCCTGGTGGAGGAGGACAAGAAGCACGAGCGGCACCCCATCT |
| | | TCGGCAACATCGTGGACGAGGTGGCCTACCACGAGAAGTACCCCACCATCTACCACCTGCGGAAGAAGCTG |
| | | GTGGACAGCACCGACAAGGCCGACCTGCGGCTGATCTACCTGGCCCTGGCCCACATGATCAAGTTCCGGGG |
| | | CCACTTCCTGATCGAGGGCGACCTGAACCCCGACAACAGCGACGTGGACAAGCTGTTCATCCAGCTGGTGCA |
| | | GACCTACAACCAGCTGTTCGAGGAGAACCCCATCAACGCCAGCGGCGTGGACGCCAAGGCCATCCTGAGCG |
| | | CCCGGCTGAGCAAGAGCCGGCGGCTGGAGAACCTGATCGCCCAGCTGCCCGGCGAGAAGAAGAACGGCCTG |
| | | TTCGGCAACCTGATCGCCCTGAGCCTGGGCCTGACCCCCAACTTCAAGAGCAACTTCGACCTGGCCGAGGAC |
| | | GCCAAGCTGCAGCTGAGCAAGGACACCTACGACGACGACCTGGACAACCTGCTGGCCCAGATCGGCGACCA |
| | | GTACGCCGACCTGTTCCTGGCCGCCAAGAACCTGAGCGACGCCATCCTGCTGAGCGACATCCTGCGGGTGAA |
| | | CACCGAGATCACCAAGGCCCCCCTGAGCGCCAGCATGATCAAGCGGTACGACGAGCACCACCAGGACCTGA |
| | | CCCTGCTGAAGGCCCTGGTGCGGCAGCAGCTGCCCGAGAAGTACAAGGAGATCTTCTTCGACCAGAGCAAG |
| | | AACGGCTACGCCGGCTACATCGACGGCGGCGCCAGCCAGGAGGAGTTCTACAAGTTCATCAAGCCCATCCT |
| | | GGAGAAGATGGACGGCACCGAGGAGCTGCTGGTGAAGCTGAACCGGGAGGACCTGCTGCGGAAGCAGCGG |
| | | ACCTTCGACAACGGCAGCATCCCCCACCAGATCCACCTGGGCGAGCTGCACGCCATCCTGCGGCGGCAGGA |
| | | GGACTTCTACCCCTTCCTGAAGGACAACCGGGAGAAGATCGAGAAGATCCTGACCTTCCGGATCCCCTACTA |
| | | CGTGGGCCCCCTGGCCCGGGGCAACAGCCGGTTCGCCTGGATGACCCGGAAGAGCGAGGAGACCATCACCC |
| | | CCTGGAACTTCGAGGAGGTGGTGGACAAGGGCGCCAGCGCCCAGAGCTTCATCGAGCGGATGACCAACTTC |
| | | GACAAGAACCTGCCCAACGAGAAGGTGCTGCCCAAGCACAGCCTGCTGTACGAGTACTTCACCGTGTACAA |
| | | CGAGCTGACCAAGGTGAAGTACGTGACCGAGGGCATGCGGAAGCCCGCCTTCCTGAGCGGCGAGCAGAAGA |
| | | AGGCCATCGTGGACCTGCTGTTCAAGACCAACCGGAAGGTGACCGTGAAGCAGCTGAAGGAGGACTACTTC |
| | | AAGAAGATCGAGTGCTTCGACAGCGTGGAGATCAGCGGCGTGGAGGACCGGTTCAACGCCAGCCTGGGCAC |
| | | CTACCACGACCTGCTGAAGATCATCAAGGACAAGGACTTCCTGGACAACGAGGAGAACGAGGACATCCTGG |
| | | AGGACATCGTGCTGACCCTGACCCTGTTCGAGGACCGGGAGATGATCGAGGAGCGGCTGAAGACCTACGCC |
| | | CACCTGTTCGACGACAAGGTGATGAAGCAGCTGAAGCGGCGGCGGTACACCGGCTGGGGCCGGCTGAGCCG |
| | | GAAGCTGATCAACGGCATCCGGGACAAGCAGAGCGGCAAGACCATCCTGGACTTCCTGAAGAGCGACGGCT |
| | | TCGCCAACCGGAACTTCATGCAGCTGATCCACGACGACAGCCTGACCTTCAAGGAGGACATCCAGAAGGCC |
| | | CAGGTGAGCGGCCAGGGCGACAGCCTGCACGAGCACATCGCCAACCTGGCCGGCAGCCCCGCCATCAAGAA |
| | | GGGCATCCTGCAGACCGTGAAGGTGGTGGACGAGCTGGTGAAGGTGATGGGCCGGCACAAGCCCGAGAACA |
| | | TCGTGATCGAGATGGCCCGGGAGAACCAGACCACCCAGAAGGGCCAGAAGAACAGCCGGGAGCGGATGAA |
| | | GCGGATCGAGGAGGGCATCAAGGAGCTGGGCAGCCAGATCCTGAAGGAGCACCCCGTGGAGAACACCCAG |
| | | CTGCAGAACGAGAAGCTGTACCTGTACTACCTGCAGAACGGCCGGGACATGTACGTGGACCAGGAGCTGGA |
| | | CATCAACCGGCTGAGCGACTACGACGTGGACGCCATCGTGCCCCAGAGCTTCCTGAAGGACGACAGCATCG |
| | | ACAACAAGGTGCTGACCCGGAGCGACAAGAACCGGGGCAAGAGCGACAACGTGCCCAGCGAGGAGGTGGT |
| | | GAAGAAGATGAAGAACTACTGGCGGCAGCTGCTGAACGCCAAGCTGATCACCCAGCGGAAGTTCGACAACC |
| | | TGACCAAGGCCGAGCGGGGCGGCCTGAGCGAGCTGGACAAGGCCGGCTTCATCAAGCGGCAGCTGGTGGAG |
| | | ACCCGGCAGATCACCAAGCACGTGGCCCAGATCCTGGACAGCCGGATGAACACCAAGTACGACGAGAACGA |
| | | CAAGCTGATCCGGGAGGTGAAGGTGATCACCCTGAAGAGCAAGCTGGTGAGCGACTTCCGGAAGGACTTCC |
| | | AGTTCTACAAGGTGCGGGAGATCAACAACTACCACCACGCCCACGACGCCTACCTGAACGCCGTGGTGGGC |
| | | ACCGCCCTGATCAAGAAGTACCCCAAGCTGGAGAGCGAGTTCGTGTACGGCGACTACAAGGTGTACGACGT |
| | | GCGGAAGATGATCGCCAAGAGCGAGCAGGAGATCGGCAAGGCCACCGCCAAGTACTTCTTCTACAGCAACA |
| | | TCATGAACTTCTTCAAGACCGAGATCACCCTGGCCAACGGCGAGATCCGGAAGCGGCCCCTGATCGAGACC |
| | | AACGGCGAGACCGGCGAGATCGTGTGGGACAAGGGCCGGGACTTCGCCACCGTGCGGAAGGTGCTGAGCAT |
| | | GCCCCAGGTGAACATCGTGAAGAAGACCGAGGTGCAGACCGGCGGCTTCAGCAAGGAGAGCATCCTGCCCA |
| | | AGCGGAACAGCGACAAGCTGATCGCCCGGAAGAAGGACTGGGACCCCAAGAAGTACGGCGGCTTCGACAG |
| | | CCCCACCGTGGCCTACAGCGTGCTGGTGGTGGCCAAGGTGGAGAAGGGCAAGAGCAAGAAGCTGAAGAGC |
| | | GTGAAGGAGCTGCTGGGCATCACCATCATGGAGCGGAGCAGCTTCGAGAAGAACCCCATCGACTTCCTGGA |
| | | GGCCAAGGGCTACAAGGAGGTGAAGAAGGACCTGATCATCAAGCTGCCCAAGTACAGCCTGTTCGAGCTGG |
| | | AGAACGGCCGGAAGCGGATGCTGGCCAGCGCCGGCGAGCTGCAGAAGGGCAACGAGCTGGCCCTGCCCAG |
| | | CAAGTACGTGAACTTCCTGTACCTGGCCAGCCACTACGAGAAGCTGAAGGGCAGCCCCGAGGACAACGAGC |
| | | AGAAGCAGCTGTTCGTGGAGCAGCACAAGCACTACCTGGACGAGATCATCGAGCAGATCAGCGAGTTCAGC |
| | | AAGCGGGTGATCCTGGCCGACGCCAACCTGGACAAGGTGCTGAGCGCCTACAACAAGCACCGGGACAAGCC |
| | | CATCCGGGAGCAGGCCGAGAACATCATCCACCTGTTCACCCTGACCAACCTGGGCGCCCCCGCCGCCTTCAA |
| | | GTACTTCGACACCACCATCGACCGGAAGCGGTACACCAGCACCAAGGAGGTGCTGGACGCCACCCTGATCC |
| | | ACCAGAGCATCACCGGCCTGTACGAGACCCGGATCGACCTGAGCCAGCTGGGCGGCGACGGCAGCGGCAGC |
| | | CCCAAGAAGAAGCGGAAGGTGGACGGCAGCCCCAAGAAGAAGCGGAAGGTGGACAGCGGCTGA |
| 1146 | dCas9 ORF | ATGGACAAGAAGTACAGCATCGGCCTGGcCATCGGCACCAACAGCGTGGGCTGGGCCGTGATCACCGACGA |
| | | GTACAAGGTGCCCAGCAAGAAGTTCAAGGTGCTGGGCAACACCGACCGGCACAGCATCAAGAAGAACCTGA |
| | | TCGGCGCCCTGCTGTTCGACAGCGGCGAGACCGCCGAGGCCACCCGGCTGAAGCGGACCGCCCGGCGGCGG |
| | | TACACCCGGCGGAAGAACCGGATCTGCTACCTGCAGGAGATCTTCAGCAACGAGATGGCCAAGGTGGACGA |
| | | CAGCTTCTTCCACCGGCTGGAGGAGAGCTTCCTGGTGGAGGAGGACAAGAAGCACGAGCGGCACCCCATCT |
| | | TCGGCAACATCGTGGACGAGGTGGCCTACCACGAGAAGTACCCCACCATCTACCACCTGCGGAAGAAGCTG |
| | | GTGGACAGCACCGACAAGGCCGACCTGCGGCTGATCTACCTGGCCCTGGCCCACATGATCAAGTTCCGGGG |
| | | CCACTTCCTGATCGAGGGCGACCTGAACCCCGACAACAGCGACGTGGACAAGCTGTTCATCCAGCTGGTGCA |
| | | GACCTACAACCAGCTGTTCGAGGAGAACCCCATCAACGCCAGCGGCGTGGACGCCAAGGCCATCCTGAGCG |
| | | CCCGGCTGAGCAAGAGCCGGCGGCTGGAGAACCTGATCGCCCAGCTGCCCGGCGAGAAGAAGAACGGCCTG |
| | | TTCGGCAACCTGATCGCCCTGAGCCTGGGCCTGACCCCCAACTTCAAGAGCAACTTCGACCTGGCCGAGGAC |
| | | GCCAAGCTGCAGCTGAGCAAGGACACCTACGACGACGACCTGGACAACCTGCTGGCCCAGATCGGCGACCA |
| | | GTACGCCGACCTGTTCCTGGCCGCCAAGAACCTGAGCGACGCCATCCTGCTGAGCGACATCCTGCGGGTGAA |
| | | CACCGAGATCACCAAGGCCCCCCTGAGCGCCAGCATGATCAAGCGGTACGACGAGCACCACCAGGACCTGA |
| | | CCCTGCTGAAGGCCCTGGTGCGGCAGCAGCTGCCCGAGAAGTACAAGGAGATCTTCTTCGACCAGAGCAAG |
| | | AACGGCTACGCCGGCTACATCGACGGCGGCGCCAGCCAGGAGGAGTTCTACAAGTTCATCAAGCCCATCCT |
| | | GGAGAAGATGGACGGCACCGAGGAGCTGCTGGTGAAGCTGAACCGGGAGGACCTGCTGCGGAAGCAGCGG |
| | | ACCTTCGACAACGGCAGCATCCCCCACCAGATCCACCTGGGCGAGCTGCACGCCATCCTGCGGCGGCAGGA |
| | | GGACTTCTACCCCTTCCTGAAGGACAACCGGGAGAAGATCGAGAAGATCCTGACCTTCCGGATCCCCTACTA |
| | | CGTGGGCCCCCTGGCCCGGGGCAACAGCCGGTTCGCCTGGATGACCCGGAAGAGCGAGGAGACCATCACCC |
| | | CCTGGAACTTCGAGGAGGTGGTGGACAAGGGCGCCAGCGCCCAGAGCTTCATCGAGCGGATGACCAACTTC |
| | | GACAAGAACCTGCCCAACGAGAAGGTGCTGCCCAAGCACAGCCTGCTGTACGAGTACTTCACCGTGTACAA |
| | | CGAGCTGACCAAGGTGAAGTACGTGACCGAGGGCATGCGGAAGCCCGCCTTCCTGAGCGGCGAGCAGAAGA |
| | | AGGCCATCGTGGACCTGCTGTTCAAGACCAACCGGAAGGTGACCGTGAAGCAGCTGAAGGAGGACTACTTC |
| | | AAGAAGATCGAGTGCTTCGACAGCGTGGAGATCAGCGGCGTGGAGGACCGGTTCAACGCCAGCCTGGGCAC |
| | | CTACCACGACCTGCTGAAGATCATCAAGGACAAGGACTTCCTGGACAACGAGGAGAACGAGGACATCCTGG |
| | | AGGACATCGTGCTGACCCTGACCCTGTTCGAGGACCGGGAGATGATCGAGGAGCGGCTGAAGACCTACGCC |
| | | CACCTGTTCGACGACAAGGTGATGAAGCAGCTGAAGCGGCGGCGGTACACCGGCTGGGGCCGGCTGAGCCG |
| | | GAAGCTGATCAACGGCATCCGGGACAAGCAGAGCGGCAAGACCATCCTGGACTTCCTGAAGAGCGACGGCT |
| | | TCGCCAACCGGAACTTCATGCAGCTGATCCACGACGACAGCCTGACCTTCAAGGAGGACATCCAGAAGGCC |
| | | CAGGTGAGCGGCCAGGGCGACAGCCTGCACGAGCACATCGCCAACCTGGCCGGCAGCCCCGCCATCAAGAA |
| | | GGGCATCCTGCAGACCGTGAAGGTGGTGGACGAGCTGGTGAAGGTGATGGGCCGGCACAAGCCCGAGAACA |
| | | TCGTGATCGAGATGGCCCGGGAGAACCAGACCACCCAGAAGGGCCAGAAGAACAGCCGGGAGCGGATGAA |
| | | GCGGATCGAGGAGGGCATCAAGGAGCTGGGCAGCCAGATCCTGAAGGAGCACCCCGTGGAGAACACCCAG |
| | | CTGCAGAACGAGAAGCTGTACCTGTACTACCTGCAGAACGGCCGGGACATGTACGTGGACCAGGAGCTGGA |
| | | CATCAACCGGCTGAGCGACTACGACGTGGACgcCATCGTGCCCCAGAGCTTCCTGAAGGACGACAGCATCGA |
| | | CAACAAGGTGCTGACCCGGAGCGACAAGAACCGGGGCAAGAGCGACAACGTGCCCAGCGAGGAGGTGGTG |
| | | AAGAAGATGAAGAACTACTGGCGGCAGCTGCTGAACGCCAAGCTGATCACCCAGCGGAAGTTCGACAACCT |
| | | GACCAAGGCCGAGCGGGGCGGCCTGAGCGAGCTGGACAAGGCCGGCTTCATCAAGCGGCAGCTGGTGGAG |
| | | ACCCGGCAGATCACCAAGCACGTGGCCCAGATCCTGGACAGCCGGATGAACACCAAGTACGACGAGAACGA |
| | | CAAGCTGATCCGGGAGGTGAAGGTGATCACCCTGAAGAGCAAGCTGGTGAGCGACTTCCGGAAGGACTTCC |
| | | AGTTCTACAAGGTGCGGGAGATCAACAACTACCACCACGCCCACGACGCCTACCTGAACGCCGTGGTGGGC |
| | | ACCGCCCTGATCAAGAAGTACCCCAAGCTGGAGAGCGAGTTCGTGTACGGCGACTACAAGGTGTACGACGT |
| | | GCGGAAGATGATCGCCAAGAGCGAGCAGGAGATCGGCAAGGCCACCGCCAAGTACTTCTTCTACAGCAACA |
| | | TCATGAACTTCTTCAAGACCGAGATCACCCTGGCCAACGGCGAGATCCGGAAGCGGCCCCTGATCGAGACC |
| | | AACGGCGAGACCGGCGAGATCGTGTGGGACAAGGGCCGGGACTTCGCCACCGTGCGGAAGGTGCTGAGCAT |
| | | GCCCCAGGTGAACATCGTGAAGAAGACCGAGGTGCAGACCGGCGGCTTCAGCAAGGAGAGCATCCTGCCCA |
| | | AGCGGAACAGCGACAAGCTGATCGCCCGGAAGAAGGACTGGGACCCCAAGAAGTACGGCGGCTTCGACAG |
| | | CCCCACCGTGGCCTACAGCGTGCTGGTGGTGGCCAAGGTGGAGAAGGGCAAGAGCAAGAAGCTGAAGAGC |
| | | GTGAAGGAGCTGCTGGGCATCACCATCATGGAGCGGAGCAGCTTCGAGAAGAACCCCATCGACTTCCTGGA |
| | | GGCCAAGGGCTACAAGGAGGTGAAGAAGGACCTGATCATCAAGCTGCCCAAGTACAGCCTGTTCGAGCTGG |
| | | AGAACGGCCGGAAGCGGATGCTGGCCAGCGCCGGCGAGCTGCAGAAGGGCAACGAGCTGGCCCTGCCCAG |
| | | CAAGTACGTGAACTTCCTGTACCTGGCCAGCCACTACGAGAAGCTGAAGGGCAGCCCCGAGGACAACGAGC |
| | | AGAAGCAGCTGTTCGTGGAGCAGCACAAGCACTACCTGGACGAGATCATCGAGCAGATCAGCGAGTTCAGC |
| | | AAGCGGGTGATCCTGGCCGACGCCAACCTGGACAAGGTGCTGAGCGCCTACAACAAGCACCGGGACAAGCC |
| | | CATCCGGGAGCAGGCCGAGAACATCATCCACCTGTTCACCCTGACCAACCTGGGCGCCCCCGCCGCCTTCAA |
| | | GTACTTCGACACCACCATCGACCGGAAGCGGTACACCAGCACCAAGGAGGTGCTGGACGCCACCCTGATCC |
| | | ACCAGAGCATCACCGGCCTGTACGAGACCCGGATCGACCTGAGCCAGCTGGGCGGCGACTGA |

[1046] sgRNA designations are sometimes provided with one or more leading zeroes immediately following the G. This does not affect the meaning of the designation. Thus, for example, G000282, G0282, G00282, and G282 refer to the same sgRNA. Similarly, crRNA and or trRNA designations are sometimes provided with one or more leading zeroes immediately following the CR or TR, respectively, which does not affect the meaning of the designation. Thus, for example, CR000100, CR00100, CR0100, and CR100 refer to the same crRNA, and TR000200, TR00200, TR0200, and TR200 refer to the same trRNA.

[1047] For SEQ ID NOs 201-294 and 301-394, no guide region is shown and the positions corresponding to the remaining regions are each decremented by the length of the guide sequence in SEQ ID NOs: 1-90, 695-698, 101-190, and 795-798, respectively (usually but not always 20) relative to those given for SEQ ID NOs: 1-90 and 101-190. For SEQ ID NOs 401-494 and 501-594, the spacer is the length of 3+x and the positions corresponding to the remaining regions are each decremented by the length of the guide sequence in SEQ ID NOs: 1-90, 695-698, 101-190, and 795-798, respectively (usually but not always 20) and incremented by 3+x relative to those given for SEQ ID NOs: 1-90, 101-190, and 795-798, respectively.

### Definitions

[1048] “Editing efficiency” or “editing percentage” or “percent editing” as used herein is the total number of sequence reads with insertions or deletions of nucleotides into the target region of interest over the total number of sequence reads following cleavage by a Cas RNP.

[1049] “Regions” as used herein describes conserved groups of nucleic acids. Regions may also be referred to as “modules” or “domains.” Regions of an sgRNA may perform particular functions, e.g., in directing endonuclease activity of the RNP, for example as described in Briner A E et al., Molecular Cell 56:333-339 (2014). Exemplary regions of an sgRNA are described in Table 3.

[1050] “Hairpin” as used herein describes a duplex of nucleic acids that is created when a nucleic acid strand folds and forms base pairs with another section of the same strand. A hairpin may form a structure that comprises a loop or a U-shape. In some embodiments, a hairpin may be comprised of an RNA loop. Hairpins can be formed with two complementary sequences in a single nucleic acid molecule bind together, with a folding or wrinkling of the molecule. In some embodiments, hairpins comprise stem or stem loop structures. As used herein, a “hairpin region” refers to hairpin 1 and hairpin 2 and the “n” between hairpin 1 and hairpin 2 of a conserved portion of an sgRNA.

[1051] “Ribonucleoprotein” (RNP) or “RNP complex” as used herein describes an sgRNA, for example, together with a nuclease, such as a Cas protein. In some embodiments, the RNP comprises Cas9 and gRNA (e.g., sgRNA, dgRNA, or crRNA).

[1052] “Stem loop” as used herein describes a secondary structure of nucleotides that form a base-paired “stem” that ends in a loop of unpaired nucleic acids. A stem may be formed when two regions of the same nucleic acid strand are at least partially complementary in sequence when read in opposite directions. “Loop” as used herein describes a region of nucleotides that do not base pair (i.e., are not complementary) that may cap a stem. A “tetraloop” describes a loop of 4 nucleotides. As used herein, the upper stem of an sgRNA may comprise a tetraloop.

[1053] “Substituted” or “Substitution” as used herein with respect to a polynucleotide refers to an alteration of a nucleobase that changes its preferred base for Watson-Crick pairing. When a certain region of a guide RNA is “unsubstituted” as used herein, the sequence of the region can be aligned to that of the corresponding conserved portion of a spyCas9 sgRNA (SEQ ID NO: 400) with gaps and matches only (i.e., no mismatches), where bases are considered to match if they have the same preferred standard partner base (A, C, G, or T/U) for Watson-Crick pairing.

[1054] “Guide RNA”, “gRNA”, and “guide” are used herein interchangeably to refer to either a crRNA (also known as CRISPR RNA), or the combination of a crRNA and a trRNA (also known as tracrRNA). The crRNA and trRNA may be associated as a single RNA molecule (single guide RNA, sgRNA) or in two separate RNA molecules (dual guide RNA, dgRNA). “Guide RNA” or “gRNA” refers to each type. The trRNA may be a naturally-occurring sequence, or a trRNA sequence with modifications or variations compared to naturally-occurring sequences. Guide RNAs can include modified RNAs as described herein.

[1055] In some embodiments, the gRNA (e.g., sgRNA) comprises a “guide region”, which is sometimes referred to as a “spacer” or “spacer region,” for example, in Briner A E et al., Molecular Cell 56:333-339 (2014) for sgRNA (but applicable herein to all guide RNAs). The guide region or spacer region is also sometimes referred to as a “variable region,” “guide domain” or “targeting domain.” In some embodiments, a “guide region” immediately precedes a “conserved portion of an sgRNA” at its 5′ end, and in some embodiments the sgRNA is shortened. An exemplary “conserved portion of an sgRNA” is shown in Table 2. In some embodiments, a “guide region” comprises a series of nucleotides at the 5′ end of a crRNA. In some embodiments, the guide region comprises one or more YA sites (“guide region YA sites”). In some embodiments, the guide region comprises one or more YA sites located at positions from a given nucleotide relative to the 5′ end to the end of the guide region. Such ranges of positions are referred to as, e.g., “5-end, 6-end, 7-end, 8-end, 9-end, or 10-end from the 5′ end of the 5′ terminus” where the “end” in “5-end”, etc., refers to most 3′ nucleotide in the guide region. (Similarly, expressions such as “nucleotides 21-end of the gRNA” refer to the range from nucleotide 21 from the 5′ end of the 5′ terminus of the gRNA to the final nucleotide at the 3′ end of the gRNA.) Furthermore, a nucleotide that is, for example, 6 nucleotides from the 5′ end of a particular sgRNA segment is the sixth nucleotide of that segment, or “nucleotide 6” from the 5′ end, e.g., where N is the 6^{th} nucleotide from the 5′ end. A range of nucleotides that is located “at or after” 6 nucleotides from the 5′ end begins with the 6^{th} nucleotide and continues down the chain toward the 3′ end. Similarly, a nucleotide that is, for example, 5 nucleotides from the 3′ end of the chain is the 5^{th} nucleotide when counting from the 3′ end of the chain, e.g. NXXXX. A numeric position or range in the guide region refers to the position as determined from the 5′ end unless another point of reference is specified; for example, “nucleotide 5” in a guide region is the 5^{th} nucleotide from the 5′ end.

[1056] In some embodiments, a gRNA comprises nucleotides that “match the modification pattern” at corresponding or specified nucleotides of a gRNA described herein. This means that the nucleotides matching the modification pattern have the same modifications (e.g., phosphorothioate, 2′-fluoro, 2′-OMe, etc.) as the nucleotides at the corresponding positions of the gRNA described herein, regardless of whether the nucleobases at those positions match. For example, if in a first gRNA, nucleotides 5 and 6, respectively, have 2′-OMe and phosphorothioate modifications, then this gRNA has the same modification pattern at nucleotides 5 and 6 as a second gRNA that also has 2′-OMe and phosphorothioate modifications at nucleotides 5 and 6, respectively, regardless of whether the nucleobases at positions 5 and 6 are the same or different in the first and second gRNAs. However, a 2′-OMe modification at nucleotide 6 but not nucleotide 7 is not the same modification pattern at nucleotides 6 and 7 as a 2′-OMe modification at nucleotide 7 but not nucleotide 6. Similarly, a modification pattern that matches at least 75% of the modification pattern of a gRNA described herein means that at least 75% of the nucleotides have the same modifications as the corresponding positions of the gRNA described herein. Corresponding positions may be determined by pairwise or structural alignment.

[1057] A “conserved region” of a S. pyogenes Cas9 (“spyCas9” (also referred to as “spCas9”)) sgRNA” is shown in Table 2. The first row shows the numbering of the nucleotides; the second row shows the sequence (e.g., SEQ ID NO: 400); and the third row shows the regions.

[1058] As used herein, a “shortened” region in a gRNA is a region in a conserved portion of a gRNA that lacks at least 1 nucleotide compared to the corresponding region in the conserved portion shown in Table 2. Similarly, “shortened” with respect to an sgRNA means that its conserved region comprises fewer nucleotides than the sgRNA conserved region shown in Table 2. Under no circumstances does “shortened” imply any particular limitation on a process or manner of production of the gRNA. In some embodiments, a gRNA comprises a shortened hairpin 1 region, wherein (i) the shortened hairpin 1 region lacks 6-8 nucleotides; and (A) one or more of positions H1-1, H1-2, or H1-3 is deleted or substituted relative to SEQ ID NO: 400 and/or (B) one or more of positions H1-6 through H1-10 is substituted relative to SEQ ID NO: 400; or (ii) the shortened hairpin 1 region lacks 9-10 nucleotides including H1-1 and/or H1-12; or (iii) the shortened hairpin 1 region lacks 5-10 nucleotides and one or more of positions N18, H1-12, or N is substituted relative to SEQ ID NO: 400 (see Table 2). In some embodiments, a non-spyCas9 gRNA comprises a shortened hairpin 1 region that lacks 6-8 nucleotides and in which one or more positions corresponding to H1-1, H1-2, or H1-3 in SEQ ID NO: 400 as determined, for example, by pairwise or structural alignment, is deleted or substituted, one or more of positions corresponding to H1-6 through H1-10 in SEQ ID NO: 400 as determined, for example, by pairwise or structural alignment, is substituted. In some embodiments, a non-spyCas9 gRNA comprises a shortened hairpin 1 region that lacks 9-10 nucleotides including nucleotides corresponding to H1-1 and/or H1-12 in SEQ ID NO: 400 as determined, for example, by pairwise or structural alignment. In some embodiments, a non-spyCas9 gRNA comprises a shortened hairpin 1 region that lacks 5-10 nucleotides and one or more positions corresponding to N18, H1-12, or N in SEQ ID NO: 400 as determined, for example, by pairwise or structural alignment, is substituted. In some embodiments, a gRNA comprises a shortened upper stem region, wherein the shortened upper stem region lacks 1-6 nucleotides.

[1059] As used herein, a “YA site” refers to a 5′-pyrimidine-adenine-3′ dinucleotide. For clarification, a “YA site” in an original sequence that is altered by modifying a base is still considered a (modified) YA site in the resulting sequence, regardless of the absence of a literal YA dinucleotide. A “conserved region YA site” is present in the conserved region of an sgRNA. A “guide region YA site” is present in the guide region of an sgRNA. An unmodified YA site in an sgRNA may be susceptible to cleavage by RNase-A like endonucleases, e.g., RNase A. In some embodiments, a gRNA comprises about 10 YA sites in its conserved region. In some embodiments, an sgRNA comprises 1, 2, 3, 4, 5, 6, 7, 8, 9, or 10 YA sites in its conserved region. Exemplary conserved region YA sites are indicated in FIG. 1B. Exemplary guide region YA sites are not shown in FIG. 1C, as the guide region may be any sequence, including any number of YA sites. In some embodiments, an sgRNA comprises 1, 2, 3, 4, 5, 6, 7, 8, 9, or 10 of the YA sites indicated in FIG. 1C. In some embodiments, an sgRNA comprises 1, 2, 3, 4, 5, 6, 7, 8, 9, or 10 YA sites at the following positions or a subset thereof: LS5-LS6; US3-US4; US9-US10; US12-B3; LS7-LS8; LS12-N1; N6-N7; N14-N15; N17-N18; and H2-2 to H2-3. In some embodiments, a YA site comprises a substitution, e.g., at any one or more of LS6, LS7, US3, US10, B3, N7, N15, N17, H2-2 and H2-14 relative to SEQ ID NO: 400 (as determined, for example, by pairwise or structural alignment), wherein the substituent nucleotide is neither a pyrimidine that is followed by an adenine, nor an adenine that is preceded by a pyrimidine (thus rendering the substituted position not a part of a YA site). In some embodiments, a YA site comprises a modification, meaning that at least one nucleotide of the YA site is modified. In some embodiments, the pyrimidine (also called the pyrimidine position) of the YA site comprises a modification (which includes a modification altering the internucleoside linkage immediately 3′ of the sugar of the pyrimidine). In some embodiments, the adenine (also called the adenine position) of the YA site comprises a modification (which includes a modification altering the internucleoside linkage immediately 3′ of the sugar of the adenine). In some embodiments, the pyrimidine position and the adenine position of the YA site comprise modifications. In some embodiments, a gRNA guide region or gRNA conserved region described herein comprises one or more YA sites (“guide region YA sites” or “conserved region YA sites”). In some embodiments, a crRNA or a trRNA described herein comprises one or more YA sites.

[1060] As discussed herein, positions of nucleotides corresponding to those described with respect to spyCas9 gRNA can be identified in another gRNA with sequence and/or structural similarity by pairwise or structural alignment. Structural alignment is useful where molecules share similar structures despite considerable sequence variation. For example, spyCas9 and Staphylococcus aureus Cas9 (“SaCas9”) have divergent sequences, but significant structural alignment. See, e.g., FIG. 2(F) from Nishimasu et al., Cell 162(5): 1113-1126 (2015). Structural alignment can be used to identify nucleotides in a saCas9 or other sgRNA that correspond to particular positions, such as positions H1-1, H1-2, or H1-3, positions H1-6 through H1-10, position H1-12, or positions N18 or N of the conserved portion of a spyCas9 sgRNA (e.g., SEQ ID NO: 400) (see Table 2).

[1061] Structural alignment involves identifying corresponding residues across two (or more) sequences by (i) modeling the structure of a first sequence using the known structure of the second sequence or (ii) comparing the structures of the first and second sequences where both are known, and identifying the residue in the first sequence most similarly positioned to a residue of interest in the second sequence. Corresponding residues are identified in some algorithms based on distance minimization given position (e.g., nucleobase position 1 or the 1′ carbon of the pentose ring for polynucleotides, or alpha carbons for polypeptides) in the overlaid structures (e.g., what set of paired positions provides a minimized root-mean-square deviation for the alignment). When identifying positions in a non-spyCas9 gRNA corresponding to positions described with respect to spyCas9 gRNA, spyCas9 gRNA can be the “second” sequence. Where a non-spyCas9 gRNA of interest does not have an available known structure, but is more closely related to another non-spyCas9 gRNA that does have a known structure, it may be most effective to model the non-spyCas9 gRNA of interest using the known structure of the closely related non-spyCas9 gRNA, and then compare that model to the spyCas9 gRNA structure to identify the desired corresponding residue in the non-spyCas9 gRNA of interest. There is an extensive literature on structural modeling and alignment for proteins; representative disclosures include U.S. Pat. Nos. 6,859,736; 8,738,343; and those cited in Aslam et al., Electronic Journal of Biotechnology 20 (2016) 9-13. For discussion of modeling a structure based on a known related structure or structures, see, e.g., Bordoli et al., Nature Protocols 4 (2009) 1-13, and references cited therein. See also FIG. 2(F) from Nishimasu et al., Cell 162(5): 1113-1126 (2015) for alignment of nucleic acid.

[1062] A “target sequence” as used herein refers to a sequence of nucleic acid to which the guide region directs a nuclease for cleavage. In some embodiments, a spyCas9 protein may be directed by a guide region to a target sequence by the nucleotides present in the guide region. In some embodiments, the sgRNA does not comprise a spacer region.

[1063] As used herein, the “5′ end” refers to the first nucleotide of the gRNA (including a dgRNA (typically the 5′ end of the crRNA of the dgRNA), sgRNA), in which the 5′ position is not linked to another nucleotide.

[1064] As used herein, a “5′ end modification” refers to a gRNA comprising a guide region having modifications in one or more of the one (1) to about seven (7) nucleotides at its 5′ end, optionally wherein the first nucleotide (from the 5′ end) of the gRNA is modified.

[1065] As used herein, the “3′ end” refers to the end or terminal nucleotide of a gRNA, in which the 3′ position is not linked to another nucleotide. In some embodiment, the 3′ end is in the 3′ tail. In some embodiments, the 3′ end is in the conserved portion of an gRNA.

[1066] As used herein, a “3′ end modification” refers to a gRNA having modifications in one or more of the one (1) to about seven (7) nucleotides at its 3′ end, optionally wherein the last nucleotide (i.e., the 3′ most nucleotide) of the gRNA is modified. If a 3′ tail is present, the 1 to about 7 nucleotides may be within the 3′ tail. If a 3′ tail is not present, the 1 to about 7 nucleotides may be within the conserved portion of a sgRNA.

[1067] The “last,” “second to last,” “third to last,” etc., nucleotide refers to the 3′ most, second 3′ most, third 3′ most, etc., nucleotide, respectively in a given sequence. For example, in the sequence 5′-AAACTG-3′, the last, second to last, and third to last nucleotides are G, T, and C, respectively. The phrase “last 3 nucleotides” refers to the last, second to last, and third to last nucleotides; more generally, “last N nucleotides” refers to the last to the Nth to last nucleotides, inclusive. “Third nucleotide from the 3′ end of the 3′ terminus” is equivalent to “third to last nucleotide.” Similarly, “third nucleotide from the 5′ end of the 5′ terminus” is equivalent to “third nucleotide at the 5′ terminus.”

[1068] As used herein, a “protective end modification” (such as a protective 5′ end modification or protective 3′ end modification) refers to a modification of one or more nucleotides within seven nucleotides of the end of an sgRNA that reduces degradation of the sgRNA, such as exonucleolytic degradation. In some embodiments, a protective end modification comprises modifications of at least two or at least three nucleotides within seven nucleotides of the end of the sgRNA. In some embodiments, the modifications comprise phosphorothioate linkages, 2′ modifications such as 2′-OMe or 2′-fluoro, 2′-H (DNA), ENA, UNA, or a combination thereof. In some embodiments, the modifications comprise phosphorothioate linkages and 2′-OMe modifications. In some embodiments, at least three terminal nucleotides are modified, e.g., with phosphorothioate linkages or with a combination of phosphorothioate linkages and 2′-OMe modifications. Modifications known to those of skill in the art to reduce exonucleolytic degradation are encompassed.

[1069] In some embodiments, a “3′ tail” comprising between 1 and about 20 nucleotides follows the conserved portion of a sgRNA at its 3′ end.

[1070] As used herein, an “RNA-guided DNA binding agent” means a polypeptide or complex of polypeptides having RNA and DNA binding activity, or a DNA-binding subunit of such a complex, wherein the DNA binding activity is sequence-specific and depends on the sequence of the RNA. Exemplary RNA-guided DNA binding agents include Cas cleavases/nickases and inactivated forms thereof (“dCas DNA binding agents”). “Cas nuclease”, also called “Cas protein”, as used herein, encompasses Cas cleavases, Cas nickases, and dCas DNA binding agents. Cas cleavases/nickases and dCas DNA binding agents include a Csm or Cmr complex of a type III CRISPR system, the Cas10, Csm1, or Cmr2 subunit thereof, a Cascade complex of a type I CRISPR system, the Cas3 subunit thereof, and Class 2 Cas nucleases. As used herein, a “Class 2 Cas nuclease” is a single-chain polypeptide with RNA-guided DNA binding activity, such as a Cas9 nuclease or a Cpf1 nuclease. Class 2 Cas nucleases include Class 2 Cas cleavases and Class 2 Cas nickases (e.g., H840A, D10A, or N863A variants), which further have RNA-guided DNA cleavases or nickase activity, and Class 2 dCas DNA binding agents, in which cleavase/nickase activity is inactivated. Class 2 Cas nucleases include, for example, Cas9, Cpf1, C2c1, C2c2, C2c3, HF Cas9 (e.g., N497A, R661A, Q695A, Q926A variants), HypaCas9 (e.g., N692A, M694A, Q695A, H698A variants), eSPCas9(1.0) (e.g, K810A, K1003A, R1060A variants), and eSPCas9(1.1) (e.g., K848A, K1003A, R1060A variants) proteins and modifications thereof. Cpf1 protein, Zetsche et al., Cell, 163: 1-13 (2015), is homologous to Cas9, and contains a RuvC-like nuclease domain. Cpf1 sequences of Zetsche are incorporated by reference in their entirety. See, e.g., Zetsche, Tables S1 and S3. “Cas9” encompasses Spy Cas9, the variants of Cas9 listed herein, and equivalents thereof. See, e.g., Makarova et al., Nat Rev Microbiol, 13(11): 722-36 (2015); Shmakov et al., Molecular Cell, 60:385-397 (2015).

[1071] As used herein, a first sequence is considered to “comprise a sequence with at least X % identity to” a second sequence if an alignment of the first sequence to the second sequence shows that X % or more of the positions of the second sequence in its entirety are matched by the first sequence. For example, the sequence AAGA comprises a sequence with 100% identity to the sequence AAG because an alignment would give 100% identity in that there are matches to all three positions of the second sequence. The differences between RNA and DNA (generally the exchange of uridine for thymidine or vice versa) and the presence of nucleoside analogs such as modified uridines do not contribute to differences in identity or complementarity among polynucleotides as long as the relevant nucleotides (such as thymidine, uridine, or modified uridine) have the same complement (e.g., adenosine for all of thymidine, uridine, or modified uridine; another example is cytosine and 5-methylcytosine, both of which have guanosine or modified guanosine as a complement). Thus, for example, the sequence 5′-AXG where X is any modified uridine, such as pseudouridine, N1-methyl pseudouridine, or 5-methoxyuridine, is considered 100% identical to AUG in that both are perfectly complementary to the same sequence (5′-CAU). Exemplary alignment algorithms are the Smith-Waterman and Needleman-Wunsch algorithms, which are well-known in the art. One skilled in the art will understand what choice of algorithm and parameter settings are appropriate for a given pair of sequences to be aligned; for sequences of generally similar length and expected identity >50% for amino acids or >75% for nucleotides, the Needleman-Wunsch algorithm with default settings of the Needleman-Wunsch algorithm interface provided by the EBI at the www.ebi.ac.uk web server is generally appropriate.

[1072] “mRNA” is used herein to refer to a polynucleotide that is RNA or modified RNA and comprises an open reading frame that can be translated into a polypeptide (i.e., can serve as a substrate for translation by a ribosome and amino-acylated tRNAs). mRNA can comprise a phosphate-sugar backbone including ribose residues or analogs thereof, e.g., 2′-methoxy ribose residues. In some embodiments, the sugars of a nucleic acid phosphate-sugar backbone consist essentially of ribose residues, 2′-methoxy ribose residues, or a combination thereof. In general, mRNAs do not contain a substantial quantity of thymidine residues (e.g., 0 residues or fewer than 30, 20, 10, 5, 4, 3, or 2 thymidine residues; or less than 10%, 9%, 8%, 7%, 6%, 5%, 4%, 4%, 3%, 2%, 1%, 0.5%, 0.2%, or 0.1% thymidine content). An mRNA can contain modified uridines at some or all of its uridine positions.

[1073] As used herein, the “minimum uridine content” of a given ORF is the uridine content of an ORF that (a) uses a minimal uridine codon at every position and (b) encodes the same amino acid sequence as the given ORF. The minimal uridine codon(s) for a given amino acid is the codon(s) with the fewest uridines (usually 0 or 1 except for a codon for phenylalanine, where the minimal uridine codon has 2 uridines). Modified uridine residues are considered equivalent to uridines for the purpose of evaluating minimum uridine content.

[1074] As used herein, the “minimum uridine dinucleotide content” of a given ORF is the lowest possible uridine dinucleotide (UU) content of an ORF that (a) uses a minimal uridine codon (as discussed above) at every position and (b) encodes the same amino acid sequence as the given ORF. The uridine dinucleotide (UU) content can be expressed in absolute terms as the enumeration of UU dinucleotides in an ORF or on a rate basis as the percentage of positions occupied by the uridines of uridine dinucleotides (for example, AUUAU would have a uridine dinucleotide content of 40% because 2 of 5 positions are occupied by the uridines of a uridine dinucleotide). Modified uridine residues are considered equivalent to uridines for the purpose of evaluating minimum uridine dinucleotide content.

[1075] As used herein, the “minimum adenine content” of a given open reading frame (ORF) is the adenine content of an ORF that (a) uses a minimal adenine codon at every position and (b) encodes the same amino acid sequence as the given ORF. The minimal adenine codon(s) for a given amino acid is the codon(s) with the fewest adenines (usually 0 or 1 except for a codon for lysine and asparagine, where the minimal adenine codon has 2 adenines). Modified adenine residues are considered equivalent to adenines for the purpose of evaluating minimum adenine content.

[1076] As used herein, the “minimum adenine dinucleotide content” of a given open reading frame (ORF) is the lowest possible adenine dinucleotide (AA) content of an ORF that (a) uses a minimal adenine codon (as discussed above) at every position and (b) encodes the same amino acid sequence as the given ORF. The adenine dinucleotide (AA) content can be expressed in absolute terms as the enumeration of AA dinucleotides in an ORF or on a rate basis as the percentage of positions occupied by the adenines of adenine dinucleotides (for example, UAAUA would have an adenine dinucleotide content of 40% because 2 of 5 positions are occupied by the adenines of an adenine dinucleotide). Modified adenine residues are considered equivalent to adenines for the purpose of evaluating minimum adenine dinucleotide content.

[1077] As used herein, a “subject” refers to any member of the animal kingdom. In some embodiments, “subject” refers to humans. In some embodiments, “subject” refers to non-human animals. In some embodiments, “subject” refers to primates. In some embodiments, subjects include, but are not limited to, mammals, birds, reptiles, amphibians, fish, insects, and/or worms. In certain embodiments, the non-human subject is a mammal (e.g., a rodent, a mouse, a rat, a rabbit, a monkey, a dog, a cat, a sheep, cattle, a primate, and/or a pig). In some embodiments, a subject may be a transgenic animal, genetically-engineered animal, and/or a clone. In certain embodiments of the present invention the subject is an adult, an adolescent or an infant. In some embodiments, terms “individual” or “patient” are used and are intended to be interchangeable with “subject”.

### Types of Modifications Described Herein

[1078] Guide RNAs (e.g., sgRNAs, dgRNAs, and crRNAs) comprising modifications at various positions are disclosed herein. In some embodiments, a position of a gRNA that comprises a modification is modified with any one or more of the following types of modifications.

[1079] 2′-O-methyl Modifications

[1080] Modified sugars are believed to control the puckering of nucleotide sugar rings, a physical property that influences oligonucleotide binding affinity for complementary strands, duplex formation, and interaction with nucleases. Substitutions on sugar rings can therefore alter the conformation and puckering of these sugars. For example, 2′-O-methyl (2′-OMe) modifications can increase binding affinity and nuclease stability of oligonucleotides, though as shown in the Examples, the effect of any modification at a given position in an oligonucleotide needs to be empirically determined.

[1081] The terms “mA,” “mC,” “mU,” or “mG” may be used to denote a nucleotide that has been modified with 2′-OMe.

[1082] A ribonucleotide and a modified 2′-O-methyl ribonucleotide can be depicted as follows:

[chemical structure]

[1083] 2′-O-(2-methoxyethyl) Modifications

[1084] In some embodiments, the modification may be 2′-O-(2-methoxyethyl) (2′-O-moe). A modified 2′-O-moe ribonucleotide can be depicted as follows:

[chemical structure]

[1085] The terms “moeA,” “moeC,” “moeU,” or “moeG” may be used to denote a nucleotide that has been modified with 2′-O-moe.

[1086] 2′-fluoro Modifications

[1087] Another chemical modification that has been shown to influence nucleotide sugar rings is halogen substitution. For example, 2′-fluoro (2′-F) substitution on nucleotide sugar rings can increase oligonucleotide binding affinity and nuclease stability.

[1088] In this application, the terms “fA,” “fC,” “fU,” or “fG” may be used to denote a nucleotide that has been substituted with 2′-F.

[1089] A ribonucleotide without and with a 2′-F substitution can be depicted as follows:

[chemical structure]

[1090] Phosphorothioate Modifications

[1091] A phosphorothioate (PS) linkage or bond refers to a bond where a sulfur is substituted for one nonbridging phosphate oxygen in a phosphodiester linkage, for example between nucleotides. When phosphorothioates are used to generate oligonucleotides, the modified oligonucleotides may also be referred to as S-oligos.

[1092] A “*” may be used to depict a PS modification. In this application, the terms A*, C*, U*, or G* may be used to denote a nucleotide that is linked to the next (e.g., 3′) nucleotide with a PS bond. Throughout this application, PS modifications are grouped with the nucleotide whose 3′ carbon is bonded to the phosphorothioate; thus, indicating that a PS modification is at position 1 means that the phosphorothioate is bonded to the 3′ carbon of nucleotide 1 and the 5′ carbon of nucleotide 2. Thus, where a YA site is indicated as being “PS modified” or the like, the PS linkage is between the Y and A or between the A and the next nucleotide.

[1093] In this application, the terms “mA*,” “mC*,” “mU*,” or “mG*” may be used to denote a nucleotide that has been substituted with 2′-OMe and that is linked to the next (e.g., 3′) nucleotide with a PS linkage, which may sometimes be referred to as a “PS bond.” Similarly, the terms “fA*,” “fC*,” “fU*,” or “fG*” may be used to denote a nucleotide that has been substituted with 2′-F and that is linked to the next (e.g., 3′) nucleotide with a PS linkage. Equivalents of a PS linkage or bond are encompassed by embodiments described herein.

[1094] The diagram below shows the substitution of S— for a nonbridging phosphate oxygen, generating a PS linkage in lieu of a phosphodiester linkage:

[chemical structure]

[1095] Inverted Abasic Modifications

[1096] Abasic nucleotides refer to those which lack nitrogenous bases. The figure below depicts an oligonucleotide with an abasic (in this case, shown as apurinic; an abasic site could also be an apyrimidinic site, wherein the description of the abasic site is typically in reference to Watson-Crick base pairing—e.g., an apurinic site refers to a site that lacks a nitrogenous base and would typically base pair with a pyrimidinic site) site that lacks a base, wherein the base may be substituted by another moiety at the 1′ position of the furan ring (e.g., a hydroxyl group, as shown below, to form a ribose or deoxyribose site, as shown below, or a hydrogen):

[chemical structure]

[1097] Inverted bases refer to those with linkages that are inverted from the normal 5′ to 3′ linkage (i.e., either a 5′ to 5′ linkage or a 3′ to 3′ linkage). For example:

[chemical structure]

[1098] An abasic nucleotide can be attached with an inverted linkage. For example, an abasic nucleotide may be attached to the terminal 5′ nucleotide via a 5′ to 5′ linkage, or an abasic nucleotide may be attached to the terminal 3′ nucleotide via a 3′ to 3′ linkage. An inverted abasic nucleotide at either the terminal 5′ or 3′ nucleotide may also be called an inverted abasic end cap. In this application, the terms “invd” indicates an inverted abasic nucleotide linkage.

[1099] Deoxyribonucleotides

[1100] A deoxyribonucleotide (in which the sugar comprises a 2′-deoxy position) is considered a modification in the context of a gRNA, in that the nucleotide is modified relative to standard RNA by the substitution of a proton for a hydroxyl at the 2′ position. Unless otherwise indicated, a deoxyribonucleotide modification at a position that is U in an unmodified RNA can also comprise replacement of the U nucleobase with a T.

[1101] Bicyclic Ribose Analog

[1102] Exemplary bicyclic ribose analogs include locked nucleic acid (LNA), ENA, bridged nucleic acid (BNA), or another LNA-like modifications. In some instances, a bicyclic ribose analog has 2′ and 4′ positions connected through a linker. The linker can be of the formula —X—(CH₂)ₙ— where n is 1 or 2; X is O, NR, or S; and R is H or C₁₋₃ alkyl, e.g., methyl. Examples of bicyclic ribose analogs include LNAs comprising a 2′-O—CH₂-4′ bicyclic structure (oxy-LNA) (see WO 98/39352 and WO 99/14226); 2′-NH—CH₂-4′ or 2′-N(CH₃)—CH₂-4′ (amino-LNAs) (Singh et al., J. Org. Chem. 63:10035-10039 (1998); Singh et al., J. Org. Chem. 63:6078-6079 (1998)); and 2′-S—CH₂-4′ (thio-LNA) (Singh et al., J. Org. Chem. 63:6078-6079 (1998); Kumar et al., Biorg. Med. Chem. Lett. 8:2219-2222 (1998)).

### ENA

[1103] An ENA modification refers to a nucleotide comprising a 2′-0,4′-C-ethylene modification. An exemplary structure of an ENA nucleotide is shown below, in which wavy lines indicate connections to the adjacent nucleotides (or terminal positions as the case may be, with the understanding that if the 3′ terminal nucleotide is an ENA nucleotide, the 3′ position may comprise a hydroxyl rather than phosphate). For further discussion of ENA nucleotides, see, e.g., Koizumi et al., Nucleic Acids Res. 31: 3267-3273 (2003).

[chemical structure]

### UNA

[1104] A UNA or unlocked nucleic acid modification refers to a nucleotide comprising a 2′,3′-seco-RNA modification, in which the 2′ and 3′ carbons are not bonded directly to each other. An exemplary structure of a UNA nucleotide is shown below, in which wavy lines indicate connections to the adjacent phosphates or modifications replacing phosphates (or terminal positions as the case may be). For further discussion of UNA nucleotides, see, e.g., Snead et al., Molecular Therapy 2: e103, doi:10.1038/mtna.2013.36 (2013).

[chemical structure]

### Base Modifications

[1105] A base modification is any modification that alters the structure of a nucleobase or its bond to the backbone, including isomerization (as in pseudouridine). In some embodiments, a base modification includes inosine. In some embodiments, a modification comprises a base modification that reduces RNA endonuclease activity, e.g., by interfering with recognition of a cleavage site by an RNase and/or by stabilizing an RNA structure (e.g., secondary structure) that decreases accessibility of a cleavage site to an RNase. Exemplary base modifications that can stabilize RNA structures are pseudouridine and 5-methylcytosine. See Peacock et al., J Org Chem. 76: 7295-7300 (2011). In some embodiments, a base modification can increase or decrease the melting temperature (Tm) of a nucleic acid, e.g., by increasing the hydrogen bonding in a Watson-Crick base pair, forming non-canonical base pair, or creating a mismatched base pair.

[1106] The above modifications and their equivalents are included within the scope of the embodiments described herein.

### YA Modifications

[1107] A modification at a YA site (also referred to as a YA modification) can be a modification of the internucleoside linkage, a modification of the base (pyrimidine or adenine), e.g. by chemical modification, substitution, or otherwise, and/or a modification of the sugar (e.g. at the 2′ position, such as 2′-O-alkyl, 2′-F, 2′-moe, 2′-F arabinose, 2′-H (deoxyribose), and the like). In some embodiments, a “YA modification” is any modification that alters the structure of the dinucleotide motif to reduce RNA endonuclease activity, e.g., by interfering with recognition or cleavage of a YA site by an RNase and/or by stabilizing an RNA structure (e.g., secondary structure) that decreases accessibility of a cleavage site to an RNase. See Peacock et al., J Org Chem. 76: 7295-7300 (2011); Behlke, Oligonucleotides 18:305-320 (2008); Ku et al., Adv. Drug Delivery Reviews 104: 16-28 (2016); Ghidini et al., Chem. Commun., 2013, 49, 9036. Peacock et al., Belhke, Ku, and Ghidini provide exemplary modifications suitable as YA modifications. Modifications known to those of skill in the art to reduce endonucleolytic degradation are encompassed. Exemplary 2′ ribose modifications that affect the 2′ hydroxyl group involved in RNase cleavage are 2′-H and 2′-O-alkyl, including 2′-O-Me. Modifications such as bicyclic ribose analogs, UNA, and modified internucleoside linkages of the residues at the YA site can be YA modifications. Exemplary base modifications that can stabilize RNA structures are pseudouridine and 5-methylcytosine. In some embodiments, at least one nucleotide of the YA site is modified. In some embodiments, the pyrimidine (also called “pyrimidine position”) of the YA site comprises a modification (which includes a modification altering the internucleoside linkage immediately 3′ of the sugar of the pyrimidine, a modification of the pyrimidine base, and a modification of the ribose, e.g. at its 2′ position). In some embodiments, the adenine (also called “adenine position”) of the YA site comprises a modification (which includes a modification altering the internucleoside linkage immediately 3′ of the sugar of the pyrimidine, a modification of the pyrimidine base, and a modification of the ribose, e.g. at its 2′ position). In some embodiments, the pyrimidine and the adenine of the YA site comprise modifications. In some embodiments, the YA modification reduces RNA endonuclease activity.

[1108] The above modifications and their equivalents are included within the scope of the embodiments described herein.

Guide RNAs (gRNAs) Comprising Shortened Regions and/or Substitutions

[1109] In some embodiments, a gRNA (e.g., sgRNA, dgRNA, or crRNA) provided herein comprises a conserved portion comprising a hairpin region, wherein the hairpin region lacks 6-8 nucleotides, 9-10 nucleotides, or 5-10 nucleotides. In some embodiments, the gRNA is from S. pyogenes Cas9 (“spyCas9”) or a spyCas9 equivalent. In some embodiments, the gRNA is not from S. pyogenes Cas9 (“non-spyCas9”). In some embodiments, the 6-8 nucleotides, 9-10 nucleotides, or 5-10 nucleotides are consecutive.

[1110] In some embodiments, the hairpin regions lack 5, 6, 7, 8, 9, 10, 11, or 12 nucleotides. In some embodiments, the hairpin 1 portion lacks 5, 6, 7, 8, 9, 10, 11, or 12 nucleotides. In some embodiments, the hairpin 2 portion lacks 5, 6, 7, 8, 9, 10, 11, or 12 nucleotides. In some embodiments, the hairpin regions lack 5, 6, 7, 8, 9, 10, 11, or 12 consecutive nucleotides. In some embodiments, the hairpin 1 portion lacks 5, 6, 7, 8, 9, 10, 11, or 12 consecutive nucleotides. In some embodiments, the hairpin 2 portion lacks 5, 6, 7, 8, 9, 10, 11, or 12 consecutive nucleotides. In some embodiments, the 6-8 lacking nucleotides, lacking 9-10 nucleotides, or 5-10 lacking nucleotides are within hairpin 1. In some embodiments, the 6-8 lacking nucleotides, lacking 9-10 nucleotides, or 5-10 lacking nucleotides are within hairpin 2. In some embodiments, the 6-8 lacking nucleotides, lacking 9-10 nucleotides, or 5-10 lacking nucleotides are within hairpin 1 and hairpin 2. In some embodiments, the 6-8 lacking nucleotides, lacking 9-10 nucleotides, or 5-10 lacking nucleotides are within hairpin 1 or hairpin 2. In some embodiments, the 6-8 lacking nucleotides, lacking 9-10 nucleotides, or 5-10 lacking nucleotides are consecutive and include the “N” between hairpin 1 and hairpin 2. In some embodiments, the 5-10 or 6-10 lacking nucleotides include the “N” between hairpin 1 and hairpin 2. In some embodiments, the 5-10 or 6-10 lacking nucleotides are consecutive and span at least a portion of hairpin 1. In some embodiments, the 5-10 or 6-10 lacking nucleotides are consecutive and span at least a portion of hairpin 2. In some embodiments, the 6-8 lacking nucleotides, lacking 9-10 nucleotides, or 5-10 lacking nucleotides are consecutive and span at least a portion of hairpin 1 and a portion of hairpin 2. In some embodiments, the 6-8 lacking nucleotides, lacking 9-10 nucleotides, or 5-10 lacking nucleotides are consecutive and span at least a portion of hairpin 1 and the “N” between hairpin 1 and hairpin 2. In some embodiments, the 5-10 lacking nucleotides comprise or consist of nucleotides 54-58, 54-61, or 53-60 of SEQ ID NO: 400.

[1111] In some embodiments, a gRNA comprises a substituted and optionally shortened hairpin 1 region, wherein at least one of the following pairs of nucleotides are substituted in the substituted and optionally shortened hairpin 1 with Watson-Crick pairing nucleotides: H1-1 and H1-12, H1-2 and H1-11, H1-3 and H1-10, and/or H1-4 and H1-9. “Watson-Crick pairing nucleotides” include any pair capable of forming a Watson-Crick base pair, including A-T, A-U, T-A, U-A, C-G, and G-C pairs, and pairs including modified versions of any of the foregoing nucleotides that have the same base pairing preference. In some embodiments, the hairpin 1 region lacks any one or two of H1-5 through H1-8. In some embodiments, the hairpin 1 region lacks one, two, or three of the following pairs of nucleotides: H1-1 and H1-12, H1-2 and H1-11, H1-3 and H1-10 and/or H1-4 and H1-9. In some embodiments, the hairpin 1 region lacks 1-8 nucleotides of the hairpin 1 region. In any of the foregoing embodiments, the lacking nucleotides may be such that the one or more nucleotide pairs substituted with Watson-Crick pairing nucleotides (H1-1 and H1-12, H1-2 and H1-11, H1-3 and H1-10, and/or H1-4 and H1-9) form a base pair in the gRNA.

[1112] In some embodiments, the gRNA further comprises an upper stem region lacking at least 1 nucleotide, e.g., any of the shortened upper stem regions indicated in Table 1C or described elsewhere herein, which may be combined with any of the shortened or substituted hairpin 1 regions described herein, including but not limited to combinations indicated in the numbered embodiments above and represented in the sequences of Table 1A.

TABLE 1C
Exemplary combinations of hairpin 1 regions and upper stem regions

| | May be combined with any one of Upper Stem |
|---|---|
| Hairpin 1 region | regions: |
| shortened hairpin 1 region | Upper stem region lacking 1 nucleotide; or |
| lacking 6-8 nucleotides and one | Upper stem region lacking 2 nucleotides; or |
| or more of positions H1-1, H1-2, | Upper stem region lacking 3 nucleotides; or |
| or H1-3 is deleted or substituted | Upper stem region lacking 4 nucleotides; or |
| relative to SEQ ID NO: 400 | Upper stem region lacking 5 nucleotides; or |
| | Upper stem region lacking 6 nucleotides; or |
| | US3, US4, US9, US10 deleted; or |
| | US8 deleted; or |
| | US4 and US9 deleted; |
| | US5 deleted and US3, US4, US9, US10 substituted; or |
| | US8 deleted and US3, US4, US9, US10 substituted; or |
| | US4 and US9 deleted, and US3 and US10 substituted; |
| | US3, US4, US8, US9, US10 deleted; or |
| | US3, US4, US5, US9, US10 deleted |
| shortened hairpin 1 region | Upper stem region lacking 1 nucleotide; or |
| lacking 6-8 nucleotides and one | Upper stem region lacking 2 nucleotides; or |
| or more of positions H1-6 | Upper stem region lacking 3 nucleotides; or |
| through H1-10 is substituted | Upper stem region lacking 4 nucleotides; or |
| relative to SEQ ID NO: 400 | Upper stem region lacking 5 nucleotides; or |
| | Upper stem region lacking 6 nucleotides; or |
| | US3, US4, US9, US10 deleted; or |
| | US8 deleted; or |
| | US4 and US9 deleted; |
| | US5 deleted and US3, US4, US9, US10 substituted; or |
| | US8 deleted and US3, US4, US9, US10 substituted; or |
| | US4 and US9 deleted, and US3 and US10 substituted; |
| | US3, US4, US8, US9, US10 deleted; or |
| | US3, US4, US5, US9, US10 deleted |
| shortened hairpin 1 region | Upper stem region lacking 1 nucleotide; or |
| lacking 9-10 nucleotides | Upper stem region lacking 2 nucleotides; or |
| including H1-1 and/or H1-12 | Upper stem region lacking 3 nucleotides; or |
| | Upper stem region lacking 4 nucleotides; or |
| | Upper stem region lacking 5 nucleotides; or |
| | Upper stem region lacking 6 nucleotides; or |
| | US3, US4, US9, US10 deleted; or |
| | US8 deleted; or |
| | US4 and US9 deleted; |
| | US5 deleted and US3, US4, US9, US10 substituted; or |
| | US8 deleted and US3, US4, US9, US10 substituted; or |
| | US4 and US9 deleted, and US3 and US10 substituted; |
| | US3, US4, US8, US9, US10 deleted; or |
| | US3, US4, US5, US9, US10 deleted |
| shortened hairpin 1 region | Upper stem region lacking 1 nucleotide; or |
| lacking 5-10 nucleotides and one | Upper stem region lacking 2 nucleotides; or |
| or more of positions N18, H1-12, | Upper stem region lacking 3 nucleotides; or |
| or N is substituted relative to | Upper stem region lacking 4 nucleotides; or |
| SEQ ID NO: 400 | Upper stem region lacking 5 nucleotides; or |
| | Upper stem region lacking 6 nucleotides; or |
| | US3, US4, US9, US10 deleted; or |
| | US8 deleted; or |
| | US4 and US9 deleted; |
| | US5 deleted and US3, US4, US9, US10 substituted; or |
| | US8 deleted and US3, US4, US9, US10 substituted; or |
| | US4 and US9 deleted, and US3 and US10 substituted; |
| | US3, US4, US8, US9, US10 deleted; or |
| | US3, US4, US5, US9, US10 deleted |
| at least one of the following pairs | Upper stem region lacking 1 nucleotide; or |
| of nucleotides are substituted in | Upper stem region lacking 2 nucleotides; or |
| the substituted and optionally | Upper stem region lacking 3 nucleotides; or |
| shortened hairpin 1 with Watson- | Upper stem region lacking 4 nucleotides; or |
| Crick pairing nucleotides: H1-1 | Upper stem region lacking 5 nucleotides; or |
| and H1-12, H1-2 and H1-11, H1- | Upper stem region lacking 6 nucleotides; or |
| 3 and H1-10, and/or H1-4 and | US3, US4, US9, US10 deleted; or |
| H1-9 | US8 deleted; or |
| | US4 and US9 deleted; |
| | US5 deleted and US3, US4, US9, US10 substituted; or |
| | US8 deleted and US3, US4, US9, US10 substituted; or |
| | US4 and US9 deleted, and US3 and US10 substituted; |
| | US3, US4, US8, US9, US10 deleted; or |
| | US3, US4, US5, US9, US10 deleted |
| at least one of the following pairs | Upper stem region lacking 1 nucleotide; or |
| of nucleotides are substituted in | Upper stem region lacking 2 nucleotides; or |
| the substituted and optionally | Upper stem region lacking 3 nucleotides; or |
| shortened hairpin 1 with Watson- | Upper stem region lacking 4 nucleotides; or |
| Crick pairing nucleotides: H1-1 | Upper stem region lacking 5 nucleotides; or |
| and H1-12, H1-2 and H1-11, H1- | Upper stem region lacking 6 nucleotides; or |
| 3 and H1-10, and/or H1-4 and | US3, US4, US9, US10 deleted; or |
| H1-9, and the hairpin 1 region | US8 deleted; or |
| lacks any one or two of H1-5 | US4 and US9 deleted; |
| through H1-8 | US5 deleted and US3, US4, US9, US10 substituted; or |
| | US8 deleted and US3, US4, US9, US10 substituted; or |
| | US4 and US9 deleted, and US3 and US10 substituted; |
| | US3, US4, US8, US9, US10 deleted; or |
| | US3, US4, US5, US9, US10 deleted |
| at least one of the following pairs | Upper stem region lacking 1 nucleotide; or |
| of nucleotides are substituted in | Upper stem region lacking 2 nucleotides; or |
| the substituted and optionally | Upper stem region lacking 3 nucleotides; or |
| shortened hairpin 1 with Watson- | Upper stem region lacking 4 nucleotides; or |
| Crick pairing nucleotides: H1-1 | Upper stem region lacking 5 nucleotides; or |
| and H1-12, H1-2 and H1-11, H1- | Upper stem region lacking 6 nucleotides; or |
| 3 and H1-10, and/or H1-4 and | US3, US4, US9, US10 deleted; or |
| H1-9, and the hairpin 1 region | US8 deleted; or |
| lacks one, two, or three of the | US4 and US9 deleted; |
| following pairs of nucleotides: | US5 deleted and US3, US4, US9, US10 substituted; or |
| H1-1 and H1-12, H1-2 and H1-11 | US8 deleted and US3, US4, US9, US10 substituted; or |
| , H1-3 and H1-10 and/or H1-4 | US4 and US9 deleted, and US3 and US10 substituted; |
| and H1-9 | US3, US4, US8, US9, US10 deleted; or |
| | US3, US4, US5, US9, US10 deleted |
| at least one of the following pairs | Upper stem region lacking 1 nucleotide; or |
| of nucleotides are substituted in | Upper stem region lacking 2 nucleotides; or |
| the substituted and optionally | Upper stem region lacking 3 nucleotides; or |
| shortened hairpin 1 with Watson- | Upper stem region lacking 4 nucleotides; or |
| Crick pairing nucleotides: H1-1 | Upper stem region lacking 5 nucleotides; or |
| and H1-12, H1-2 and H1-11, H1- | Upper stem region lacking 6 nucleotides; or |
| 3 and H1-10, and/or H1-4 and | US3, US4, US9, US10 deleted; or |
| H1-9, and the hairpin 1 region | US8 deleted; or |
| lacks 1-8 nucleotides of the | US4 and US9 deleted; |
| hairpin 1 region | US5 deleted and US3, US4, US9, US10 substituted; or |
| | US8 deleted and US3, US4, US9, US10 substituted; or |
| | US4 and US9 deleted, and US3 and US10 substituted; |
| | US3, US4, US8, US9, US10 deleted; or |
| | US3, US4, US5, US9, US10 deleted |
| H1-2 through H1-4 or H1-2 | Upper stem region lacking 1 nucleotide; or |
| through H1-5 are deleted, and | Upper stem region lacking 2 nucleotides; or |
| H1-9 through H1-11 are deleted | Upper stem region lacking 3 nucleotides; or |
| | Upper stem region lacking 4 nucleotides; or |
| | Upper stem region lacking 5 nucleotides; or |
| | Upper stem region lacking 6 nucleotides; or |
| | US3, US4, US9, US10 deleted; or |
| | US8 deleted; or |
| | US4 and US9 deleted; |
| | US5 deleted and US3, US4, US9, US10 substituted; or |
| | US8 deleted and US3, US4, US9, US10 substituted; or |
| | US4 and US9 deleted, and US3 and US10 substituted; |
| | US3, US4, US8, US9, US10 deleted; or |
| | US3, US4, US5, US9, US10 deleted |
| H1-2 through H1-4 or H1-2 | Upper stem region lacking 1 nucleotide; or |
| through H1-5 are deleted, and | Upper stem region lacking 2 nucleotides; or |
| H1-8 through H1-11 are deleted | Upper stem region lacking 3 nucleotides; or |
| | Upper stem region lacking 4 nucleotides; or |
| | Upper stem region lacking 5 nucleotides; or |
| | Upper stem region lacking 6 nucleotides; or |
| | US3, US4, US9, US10 deleted; or |
| | US8 deleted; or |
| | US4 and US9 deleted; |
| | US5 deleted and US3, US4, US9, US10 substituted; or |
| | US8 deleted and US3, US4, US9, US10 substituted; or |
| | US4 and US9 deleted, and US3 and US10 substituted; |
| | US3, US4, US8, US9, US10 deleted; or |
| | US3, US4, US5, US9, US10 deleted |
| H1-1, H1-3 through H1-8, and | Upper stem region lacking 1 nucleotide; or |
| H1-12 are deleted | Upper stem region lacking 2 nucleotides; or |
| | Upper stem region lacking 3 nucleotides; or |
| | Upper stem region lacking 4 nucleotides; or |
| | Upper stem region lacking 5 nucleotides; or |
| | Upper stem region lacking 6 nucleotides; or |
| | US3, US4, US9, US10 deleted; or |
| | US8 deleted; or |
| | US4 and US9 deleted; |
| | US5 deleted and US3, US4, US9, US10 substituted; or |
| | US8 deleted and US3, US4, US9, US10 substituted; or |
| | US4 and US9 deleted, and US3 and US10 substituted; |
| | US3, US4, US8, US9, US10 deleted; or |
| | US3, US4, US5, US9, US10 deleted |
| H1-2 through H1-8 are deleted | Upper stem region lacking 1 nucleotide; or |
| | Upper stem region lacking 2 nucleotides; or |
| | Upper stem region lacking 3 nucleotides; or |
| | Upper stem region lacking 4 nucleotides; or |
| | Upper stem region lacking 5 nucleotides; or |
| | Upper stem region lacking 6 nucleotides; or |
| | US3, US4, US9, US10 deleted; or |
| | US8 deleted; or |
| | US4 and US9 deleted; |
| | US5 deleted and US3, US4, US9, US10 substituted; or |
| | US8 deleted and US3, US4, US9, US10 substituted; or |
| | US4 and US9 deleted, and US3 and US10 substituted; |
| | US3, US4, US8, US9, US10 deleted; or |
| | US3, US4, US5, US9, US10 deleted |
| H1-3 through H1-9 are deleted | Upper stem region lacking 1 nucleotide; or |
| | Upper stem region lacking 2 nucleotides; or |
| | Upper stem region lacking 3 nucleotides; or |
| | Upper stem region lacking 4 nucleotides; or |
| | Upper stem region lacking 5 nucleotides; or |
| | Upper stem region lacking 6 nucleotides; or |
| | US3, US4, US9, US10 deleted; or |
| | US8 deleted; or |
| | US4 and US9 deleted; |
| | US5 deleted and US3, US4, US9, US10 substituted; or |
| | US8 deleted and US3, US4, US9, US10 substituted; or |
| | US4 and US9 deleted, and US3 and US10 substituted; |
| | US3, US4, US8, US9, US10 deleted; or |
| | US3, US4, US5, US9, US10 deleted |
| H1-7 and H1-8 are substituted | Upper stem region lacking 1 nucleotide; or |
| with a G and a C, respectively, | Upper stem region lacking 2 nucleotides; or |
| and positions H1-2 through H1-4 | Upper stem region lacking 3 nucleotides; or |
| and H1-9 through H1-11 are | Upper stem region lacking 4 nucleotides; or |
| deleted | Upper stem region lacking 5 nucleotides; or |
| | Upper stem region lacking 6 nucleotides; or |
| | US3, US4, US9, US10 deleted; or |
| | US8 deleted; or |
| | US4 and US9 deleted; |
| | US5 deleted and US3, US4, US9, US10 substituted; or |
| | US8 deleted and US3, US4, US9, US10 substituted; or |
| | US4 and US9 deleted, and US3 and US10 substituted; |
| | US3, US4, US8, US9, US10 deleted; or |
| | US3, US4, US5, US9, US10 deleted |
| H1-6 and H1-7 are substituted | Upper stem region lacking 1 nucleotide; or |
| with a C and a U, respectively, | Upper stem region lacking 2 nucleotides; or |
| and positions H1-2 through H1-4 | Upper stem region lacking 3 nucleotides; or |
| and H1-9 through H1-11 are | Upper stem region lacking 4 nucleotides; or |
| deleted | Upper stem region lacking 5 nucleotides; or |
| | Upper stem region lacking 6 nucleotides; or |
| | US3, US4, US9, US10 deleted; or |
| | US8 deleted; or |
| | US4 and US9 deleted; |
| | US5 deleted and US3, US4, US9, US10 substituted; or |
| | US8 deleted and US3, US4, US9, US10 substituted; or |
| | US4 and US9 deleted, and US3 and US10 substituted; |
| | US3, US4, US8, US9, US10 deleted; or |
| | US3, US4, US5, US9, US10 deleted |
| H1-1 and H1-12 are substituted | Upper stem region lacking 1 nucleotide; or |
| with a C and a G, respectively, | Upper stem region lacking 2 nucleotides; or |
| and positions H1-2 through H1-4 | Upper stem region lacking 3 nucleotides; or |
| and H1-9 through H1-11 are | Upper stem region lacking 4 nucleotides; or |
| deleted | Upper stem region lacking 5 nucleotides; or |
| | Upper stem region lacking 6 nucleotides; or |
| | US3, US4, US9, US10 deleted; or |
| | US8 deleted; or |
| | US4 and US9 deleted; |
| | US5 deleted and US3, US4, US9, US10 substituted; or |
| | US8 deleted and US3, US4, US9, US10 substituted; or |
| | US4 and US9 deleted, and US3 and US10 substituted; |
| | US3, US4, US8, US9, US10 deleted; or |
| | US3, US4, US5, US9, US10 deleted |
| shortened hairpin 1 region with a | Upper stem region lacking 1 nucleotide; or |
| length of 2 nucleotides | Upper stem region lacking 2 nucleotides; or |
| | Upper stem region lacking 3 nucleotides; or |
| | Upper stem region lacking 4 nucleotides; or |
| | Upper stem region lacking 5 nucleotides; or |
| | Upper stem region lacking 6 nucleotides; or |
| | US3, US4, US9, US10 deleted; or |
| | US8 deleted; or |
| | US4 and US9 deleted; |
| | US5 deleted and US3, US4, US9, US10 substituted; or |
| | US8 deleted and US3, US4, US9, US10 substituted; or |
| | US4 and US9 deleted, and US3 and US10 substituted; |
| | US3, US4, US8, US9, US10 deleted; or |
| | US3, US4, US5, US9, US10 deleted |
| shortened hairpin 1 region with a | Upper stem region lacking 1 nucleotide; or |
| length of 3 nucleotides | Upper stem region lacking 2 nucleotides; or |
| | Upper stem region lacking 3 nucleotides; or |
| | Upper stem region lacking 4 nucleotides; or |
| | Upper stem region lacking 5 nucleotides; or |
| | Upper stem region lacking 6 nucleotides; or |
| | US3, US4, US9, US10 deleted; or |
| | US8 deleted; or |
| | US4 and US9 deleted; |
| | US5 deleted and US3, US4, US9, US10 substituted; or |
| | US8 deleted and US3, US4, US9, US10 substituted; or |
| | US4 and US9 deleted, and US3 and US10 substituted; |
| | US3, US4, US8, US9, US10 deleted; or |
| | US3, US4, US5, US9, US10 deleted |
| shortened hairpin 1 region with a | Upper stem region lacking 1 nucleotide; or |
| length of 4 nucleotides | Upper stem region lacking 2 nucleotides; or |
| | Upper stem region lacking 3 nucleotides; or |
| | Upper stem region lacking 4 nucleotides; or |
| | Upper stem region lacking 5 nucleotides; or |
| | Upper stem region lacking 6 nucleotides; or |
| | US3, US4, US9, US10 deleted; or |
| | US8 deleted; or |
| | US4 and US9 deleted; |
| | US5 deleted and US3, US4, US9, US10 substituted; or |
| | US8 deleted and US3, US4, US9, US10 substituted; or |
| | US4 and US9 deleted, and US3 and US10 substituted; |
| | US3, US4, US8, US9, US10 deleted; or |
| | US3, US4, US5, US9, US10 deleted |
| shortened hairpin 1 region with a | Upper stem region lacking 1 nucleotide; or |
| length of 5 nucleotides | Upper stem region lacking 2 nucleotides; or |
| | Upper stem region lacking 3 nucleotides; or |
| | Upper stem region lacking 4 nucleotides; or |
| | Upper stem region lacking 5 nucleotides; or |
| | Upper stem region lacking 6 nucleotides; or |
| | US3, US4, US9, US10 deleted; or |
| | US8 deleted; or |
| | US4 and US9 deleted; |
| | US5 deleted and US3, US4, US9, US10 substituted; or |
| | US8 deleted and US3, US4, US9, US10 substituted; or |
| | US4 and US9 deleted, and US3 and US10 substituted; |
| | US3, US4, US8, US9, US10 deleted; or |
| | US3, US4, US5, US9, US10 deleted |
| shortened hairpin 1 region with a | Upper stem region lacking 1 nucleotide; or |
| length of 6 nucleotides | Upper stem region lacking 2 nucleotides; or |
| | Upper stem region lacking 3 nucleotides; or |
| | Upper stem region lacking 4 nucleotides; or |
| | Upper stem region lacking 5 nucleotides; or |
| | Upper stem region lacking 6 nucleotides; or |
| | US3, US4, US9, US10 deleted; or |
| | US8 deleted; or |
| | US4 and US9 deleted; |
| | US5 deleted and US3, US4, US9, US10 substituted; or |
| | US8 deleted and US3, US4, US9, US10 substituted; or |
| | US4 and US9 deleted, and US3 and US10 substituted; |
| | US3, US4, US8, US9, US10 deleted; or |
| | US3, US4, US5, US9, US10 deleted |
| shortened hairpin 1 region with a | Upper stem region lacking 1 nucleotide; or |
| length of 7 nucleotides | Upper stem region lacking 2 nucleotides; or |
| | Upper stem region lacking 3 nucleotides; or |
| | Upper stem region lacking 4 nucleotides; or |
| | Upper stem region lacking 5 nucleotides; or |
| | Upper stem region lacking 6 nucleotides; or |
| | US3, US4, US9, US10 deleted; or |
| | US8 deleted; or |
| | US4 and US9 deleted; |
| | US5 deleted and US3, US4, US9, US10 substituted; or |
| | US8 deleted and US3, US4, US9, US10 substituted; or |
| | US4 and US9 deleted, and US3 and US10 substituted; |
| | US3, US4, US8, US9, US10 deleted; or |
| | US3, US4, US5, US9, US10 deleted |
| shortened hairpin 1 region with a | Upper stem region lacking 1 nucleotide; or |
| length of 8 nucleotides | Upper stem region lacking 2 nucleotides; or |
| | Upper stem region lacking 3 nucleotides; or |
| | Upper stem region lacking 4 nucleotides; or |
| | Upper stem region lacking 5 nucleotides; or |
| | Upper stem region lacking 6 nucleotides; or |
| | US3, US4, US9, US10 deleted; or |
| | US8 deleted; or |
| | US4 and US9 deleted; |
| | US5 deleted and US3, US4, US9, US10 substituted; or |
| | US8 deleted and US3, US4, US9, US10 substituted; or |
| | US4 and US9 deleted, and US3 and US10 substituted; |
| | US3, US4, US8, US9, US10 deleted; or |
| | US3, US4, US5, US9, US10 deleted |
| shortened hairpin 1 region with a | Upper stem region lacking 1 nucleotide; or |
| length of 9 nucleotides | Upper stem region lacking 2 nucleotides; or |
| | Upper stem region lacking 3 nucleotides; or |
| | Upper stem region lacking 4 nucleotides; or |
| | Upper stem region lacking 5 nucleotides; or |
| | Upper stem region lacking 6 nucleotides; or |
| | US3, US4, US9, US10 deleted; or |
| | US8 deleted; or |
| | US4 and US9 deleted; |
| | US5 deleted and US3, US4, US9, US10 substituted; or |
| | US8 deleted and US3, US4, US9, US10 substituted; or |
| | US4 and US9 deleted, and US3 and US10 substituted; |
| | US3, US4, US8, US9, US10 deleted; or |
| | US3, US4, US5, US9, US10 deleted |
| shortened hairpin 1 region with a | Upper stem region lacking 1 nucleotide; or |
| length of 10 nucleotides | Upper stem region lacking 2 nucleotides; or |
| | Upper stem region lacking 3 nucleotides; or |
| | Upper stem region lacking 4 nucleotides; or |
| | Upper stem region lacking 5 nucleotides; or |
| | Upper stem region lacking 6 nucleotides; or |
| | US3, US4, US9, US10 deleted; or |
| | US8 deleted; or |
| | US4 and US9 deleted; |
| | US5 deleted and US3, US4, US9, US10 substituted; or |
| | US8 deleted and US3, US4, US9, US10 substituted; or |
| | US4 and US9 deleted, and US3 and US10 substituted; |
| | US3, US4, US8, US9, US10 deleted; or |
| | US3, US4, US5, US9, US10 deleted |
| H1-1 and H1-12 are substituted | Upper stem region lacking 1 nucleotide; or |
| (optionally with a C and a G, | Upper stem region lacking 2 nucleotides; or |
| respectively), and positions H1-2 | Upper stem region lacking 3 nucleotides; or |
| through H1-4 and H1-9 through | Upper stem region lacking 4 nucleotides; or |
| H1-11 are deleted | Upper stem region lacking 5 nucleotides; or |
| | Upper stem region lacking 6 nucleotides; or |
| | US3, US4, US9, US10 deleted; or |
| | US8 deleted; or |
| | US4 and US9 deleted; |
| | US5 deleted and US3, US4, US9, US10 substituted; or |
| | US8 deleted and US3, US4, US9, US10 substituted; or |
| | US4 and US9 deleted, and US3 and US10 substituted; |
| | US3, US4, US8, US9, US10 deleted; or |
| | US3, US4, US5, US9, US10 deleted |
| H1-1 through H1-8 and H1-11 | Upper stem region lacking 1 nucleotide; or |
| through H1-12 are deleted | Upper stem region lacking 2 nucleotides; or |
| | Upper stem region lacking 3 nucleotides; or |
| | Upper stem region lacking 4 nucleotides; or |
| | Upper stem region lacking 5 nucleotides; or |
| | Upper stem region lacking 6 nucleotides; or |
| | US3, US4, US9, US10 deleted; or |
| | US8 deleted; or |
| | US4 and US9 deleted; |
| | US5 deleted and US3, US4, US9, US10 substituted; or |
| | US8 deleted and US3, US4, US9, US10 substituted; or |
| | US4 and US9 deleted, and US3 and US10 substituted; |
| | US3, US4, US8, US9, US10 deleted; or |
| | US3, US4, US5, US9, US10 deleted |
| N18 is substituted with a C and | Upper stem region lacking 1 nucleotide; or |
| H1-4 through H1-11 are deleted | Upper stem region lacking 2 nucleotides; or |
| | Upper stem region lacking 3 nucleotides; or |
| | Upper stem region lacking 4 nucleotides; or |
| | Upper stem region lacking 5 nucleotides; or |
| | Upper stem region lacking 6 nucleotides; or |
| | US3, US4, US9, US10 deleted; or |
| | US8 deleted; or |
| | US4 and US9 deleted; |
| | US5 deleted and US3, US4, US9, US10 substituted; or |
| | US8 deleted and US3, US4, US9, US10 substituted; or |
| | US4 and US9 deleted, and US3 and US10 substituted; |
| | US3, US4, US8, US9, US10 deleted; or |
| | US3, US4, US5, US9, US10 deleted |
| H1-12 is substituted with a C, | Upper stem region lacking 1 nucleotide; or |
| position N is substituted with an | Upper stem region lacking 2 nucleotides; or |
| A, and positions H1-4 through | Upper stem region lacking 3 nucleotides; or |
| H1-11 are deleted | Upper stem region lacking 4 nucleotides; or |
| | Upper stem region lacking 5 nucleotides; or |
| | Upper stem region lacking 6 nucleotides; or |
| | US3, US4, US9, US10 deleted; or |
| | US8 deleted; or |
| | US4 and US9 deleted; |
| | US5 deleted and US3, US4, US9, US10 substituted; or |
| | US8 deleted and US3, US4, US9, US10 substituted; or |
| | US4 and US9 deleted, and US3 and US10 substituted; |
| | US3, US4, US8, US9, US10 deleted; or |
| | US3, US4, US5, US9, US10 deleted |
| position H1-12 is substituted with | Upper stem region lacking 1 nucleotide; or |
| an A, position N is substituted | Upper stem region lacking 2 nucleotides; or |
| with an A, and positions H1-4 | Upper stem region lacking 3 nucleotides; or |
| through H1-11 are deleted | Upper stem region lacking 4 nucleotides; or |
| | Upper stem region lacking 5 nucleotides; or |
| | Upper stem region lacking 6 nucleotides; or |
| | US3, US4, US9, US10 deleted; or |
| | US8 deleted; or |
| | US4 and US9 deleted; |
| | US5 deleted and US3, US4, US9, US10 substituted; or |
| | US8 deleted and US3, US4, US9, US10 substituted; or |
| | US4 and US9 deleted, and US3 and US10 substituted; |
| | US3, US4, US8, US9, US10 deleted; or |
| | US3, US4, US5, US9, US10 deleted |
| H1-2 through H1-4 and H1-9 | Upper stem region lacking 1 nucleotide; or |
| through H1-11 deleted; H1-7 and | Upper stem region lacking 2 nucleotides; or |
| H1-8 optionally substituted | Upper stem region lacking 3 nucleotides; or |
| | Upper stem region lacking 4 nucleotides; or |
| | Upper stem region lacking 5 nucleotides; or |
| | Upper stem region lacking 6 nucleotides; or |
| | US3, US4, US9, US10 deleted; or |
| | US8 deleted; or |
| | US4 and US9 deleted; |
| | US5 deleted and US3, US4, US9, US10 substituted; or |
| | US8 deleted and US3, US4, US9, US10 substituted; or |
| | US4 and US9 deleted, and US3 and US10 substituted; |
| | US3, US4, US8, US9, US10 deleted; or |
| | US3, US4, US5, US9, US10 deleted |
| H1-2 through H1-4 and H1-9 | US3, US4, US9, US10 deleted; or |
| through H1-11 deleted | US8 deleted; or |
| | US4 and US9 deleted; |
| | US5 deleted and US3, US4, US9, US10 substituted; or |
| | US8 deleted and US3, US4, US9, US10 substituted; or |
| | US4 and US9 deleted, and US3 and US10 substituted; |
| | US3, US4, US8, US9, US10 deleted; or |
| | US3, US4, US5, US9, US10 deleted |
| H1-2 through H1-5 and H1-9 | US3, US4, US9, US10 deleted; or |
| through H1-11 deleted | US8 deleted; or |
| | US4 and US9 deleted; |
| | US5 deleted and US3, US4, US9, US10 substituted; or |
| | US8 deleted and US3, US4, US9, US10 substituted; or |
| | US4 and US9 deleted, and US3 and US10 substituted; |
| | US3, US4, US8, US9, US10 deleted; or |
| | US3, US4, US5, US9, US10 deleted |
| H1-8 substituted and H1-2 | US3, US4, US9, US10 deleted; or |
| through 5 and H1-9 through 11 | US8 deleted; or |
| deleted | US4 and US9 deleted; |
| | US5 deleted and US3, US4, US9, US10 substituted; or |
| | US8 deleted and US3, US4, US9, US10 substituted; or |
| | US4 and US9 deleted, and US3 and US10 substituted; |
| | US3, US4, US8, US9, US10 deleted; or |
| | US3, US4, US5, US9, US10 deleted |
| H1-6 and H1-8 substituted; and | US3, US4, US9, US10 deleted; or |
| H1-2 through 5 and H1-9 through | US8 deleted; or |
| 11 deleted | US4 and US9 deleted; |
| | US5 deleted and US3, US4, US9, US10 substituted; or |
| | US8 deleted and US3, US4, US9, US10 substituted; or |
| | US4 and US9 deleted, and US3 and US10 substituted; |
| | US3, US4, US8, US9, US10 deleted; or |
| | US3, US4, US5, US9, US10 deleted |
| H1-2 through H1-5 and H1-8 | US3, US4, US9, US10 deleted; or |
| through 11 deleted | US8 deleted; or |
| | US4 and US9 deleted; |
| | US5 deleted and US3, US4, US9, US10 substituted; or |
| | US8 deleted and US3, US4, US9, US10 substituted; or |
| | US4 and US9 deleted, and US3 and US10 substituted; |
| | US3, US4, US8, US9, US10 deleted; or |
| | US3, US4, US5, US9, US10 deleted |
| H1-1, H1-3, H1-4, H1-9, H1-10, | US3, US4, US9, US10 deleted; or |
| and H1-12 deleted | US8 deleted; or |
| | US4 and US9 deleted; |
| | US5 deleted and US3, US4, US9, US10 substituted; or |
| | US8 deleted and US3, US4, US9, US10 substituted; or |
| | US4 and US9 deleted, and US3 and US10 substituted; |
| | US3, US4, US8, US9, US10 deleted; or |
| | US3, US4, US5, US9, US10 deleted |
| H1-1, H1-3, H1-4, H1-5, H1-6, | US3, US4, US9, US10 deleted; or |
| H1-7, H1-8, H1-12 deleted | US8 deleted; or |
| | US4 and US9 deleted; |
| | US5 deleted and US3, US4, US9, US10 substituted; or |
| | US8 deleted and US3, US4, US9, US10 substituted; or |
| | US4 and US9 deleted, and US3 and US10 substituted; |
| | US3, US4, US8, US9, US10 deleted; or |
| | US3, US4, US5, US9, US10 deleted |
| H1-1 through H1-9, H1-11, H1- | US3, US4, US9, US10 deleted; or |
| 12 deleted | US8 deleted; or |
| | US4 and US9 deleted; |
| | US5 deleted and US3, US4, US9, US10 substituted; or |
| | US8 deleted and US3, US4, US9, US10 substituted; or |
| | US4 and US9 deleted, and US3 and US10 substituted; |
| | US3, US4, US8, US9, US10 deleted; or |
| | US3, US4, US5, US9, US10 deleted |
| H1-6 through H1-10 deleted; H1- | US3, US4, US9, US10 deleted; or |
| 12 and N optionally substituted | US8 deleted; or |
| | US4 and US9 deleted; |
| | US5 deleted and US3, US4, US9, US10 substituted; or |
| | US8 deleted and US3, US4, US9, US10 substituted; or |
| | US4 and US9 deleted, and US3 and US10 substituted; |
| | US3, US4, US8, US9, US10 deleted; or |
| | US3, US4, US5, US9, US10 deleted |
| H1-6 through H1-10 deleted; N18 | US3, US4, US9, US10 deleted; or |
| substituted | US8 deleted; or |
| | US4 and US9 deleted; |
| | US5 deleted and US3, US4, US9, US10 substituted; or |
| | US8 deleted and US3, US4, US9, US10 substituted; or |
| | US4 and US9 deleted, and US3 and US10 substituted; |
| | US3, US4, US8, US9, US10 deleted; or |
| | US3, US4, US5, US9, US10 deleted |

[1113] In Table 1C, where US3, US4, US9, and US10 are substituted, they may be substituted with G-C or C-G base pairs (where US3 pairs to US10 and US4 pairs to US9), e.g., US3, US4, US9, and US10 may be substituted with a G, C, G, and C, respectively. Similarly, where US3 and US10 are substituted, they may be substituted with a G-C or C-G base pair (where US3 pairs to US10), e.g., US3 and US10 may be substituted with a G and C, respectively, or a C and G, respectively.

[1114] In some embodiments, the gRNA described herein further comprises a nexus region, wherein the nexus region lacks at least one nucleotide. In some embodiments, the gRNA lacks at least 2, 3, 4, 5, 6, 7, 8, 9, or 10 nucleotides in the nexus region. In some embodiments, the gRNA lacks at least 1-2, 1-3, 1-4 nucleotides, 1-5 nucleotides, 1-6 nucleotides, 1-10 nucleotides, or 1-15 nucleotides in the nexus region. In some embodiments, the gRNA lacks each nucleotide in the nexus region.

[1115] In some embodiments, the gRNA further comprises a guide region. In some embodiments, the guide region comprises the first 1-10, 11, 12, 13, 14, 15, 16, 17, 18, 19, or 20 nucleotides at the 5′ end of the gRNA. In some embodiments, the guide region comprises 20 nucleotides. In some embodiments, the guide region comprises 5, 6, 7, 8, 9, 10, 11, 12, 13, 14, 15, 16, 17, 18, 19, 20, 21, 22, 23, 24, or 25 or more nucleotides. In some embodiments, the guide region comprises 17 nucleotides. In some embodiments, the guide region comprises 18 nucleotides. In some embodiments, the guide region comprises 19 nucleotides.

[1116] In some embodiments, the selection of the guide region is determined based on target sequences within the gene of interest for editing. For example, in some embodiments, the gRNA comprises a guide region that is complementary to target sequences of a gene of interest.

[1117] In some embodiments, the target sequence in the gene of interest may be complementary to the guide region of the gRNA. In some embodiments, the degree of complementarity or identity between a guide region of a gRNA and its corresponding target sequence in the gene of interest may be about 50%, 55%, 60%, 65%, 70%, 75%, 80%, 85%, 90%, 95%, 96%, 97%, 98%, 99%, or 100%. In some embodiments, the guide region of a gRNA and the target region of a gene of interest may be 100% complementary or identical. In other embodiments, the guide region of a gRNA and the target region of a gene of interest may contain at least one mismatch. For example, the guide region of a gRNA and the target sequence of a gene of interest may contain 1, 2, 3, 4, 5, 6, 7, 8, 9, or 10 mismatches, where the total length of the target sequence is at least about 17, 18, 19, 20 or more base pairs. In some embodiments, the guide region of a gRNA and the target region of a gene of interest may contain 1-6 mismatches where the guide sequence comprises at least about 17, 18, 19, 20 or more nucleotides. In some embodiments, the guide region of a gRNA and the target region of a gene of interest may contain 1, 2, 3, 4, 5, or 6 mismatches where the guide sequence comprises about 20 nucleotides. The 5′ terminus may comprise nucleotides that are not considered guide regions (i.e., do not function to direct a Cas9 protein to a target nucleic acid).

[1118] In some embodiments, an gRNA comprises a 5′ end modification or a 3′ end modification and a conserved portion of an gRNA comprising a shortened hairpin 1 region, wherein
[1119] (i) the shortened hairpin 1 region lacks 6-8 nucleotides; and (A) one or more of positions H1-1, H1-2, or H1-3 is deleted or substituted relative to SEQ ID NO: 400 and/or (B) one or more of positions H1-6 through H1-10 is substituted relative to SEQ ID NO: 400; or
[1120] (ii) the shortened hairpin 1 region lacks 9-10 nucleotides including H1-1 and/or H1-12; or
[1121] (iii) the shortened hairpin 1 region lacks 5-10 nucleotides and one or more of positions N18, H1-12, or N is substituted relative to SEQ ID NO: 400. N18 and N refer to the nucleotides immediately 5′ and 3′ of hairpin 1, respectively, in Table 2.

[1122] In some embodiments, an gRNA comprises a 5′ end modification or a 3′ end modification and a conserved portion of the gRNA comprises a shortened upper stem region, wherein the shortened upper stem region lacks 1-6 nucleotides.

[1123] In some embodiments, an gRNA comprises a 5′ end modification or a 3′ end modification and a conserved portion of the gRNA comprises a substitution relative to SEQ ID NO: 400 at any one or more of LS6, LS7, US3, US10, B3, N7, N15, N17, H2-2 and H2-14. The substituent nucleotide is neither a pyrimidine that is followed by an adenine, nor an adenine that is preceded by a pyrimidine.

[1124] In some embodiments, an gRNA comprises a 5′ end modification or a 3′ end modification and a conserved portion of the gRNA comprises one or more of (a), (b), and (c) above.

[1125] In some embodiments, a conserved portion of an gRNA described herein further comprises one or more deletion or substitution in a nexus region, an lower stem region, or a bulge region.

[1126] In some embodiments, an gRNA comprises one or more of the following deletion in the hairpin 1 region (H1-H12).

[1127] Shortened Hairpin 1 Region

[1128] In some embodiments, a conserved portion of an gRNA described herein comprises (a) a shortened hairpin 1 region lacking 6-8 nucleotides. In some embodiments, a conserved portion of an gRNA described herein comprises (a) a shortened hairpin 1 region lacking 6-8 nucleotides and one or more deletion or substation in a shortened hairpin region. In some embodiments, the hairpin 1 region lacks 6-8 nucleotides, and one or more of positions positions H1-1, H1-2, or H1-3 is deleted or substituted relative to SEQ ID NO: 400. In some embodiments, position H1-1 is deleted. In some embodiments, position H1-1 is substituted. In some embodiments, position position H1-2 is deleted. In some embodiments, position position H1-2 is substituted. In some embodiments, position position H1-3 is deleted. In some embodiments, position H1-3 is substituted.

[1129] In some embodiments, the shortened hairpin 1 region lacks 6-8 nucleotides, and one or more of positions H1-6 through H1-10 is substituted relative to SEQ ID NO: 400. In some embodiments, position H1-6 is substituted. In some embodiments, position H1-7 is substituted. In some embodiments, position H1-8 is substituted. In some embodiments, position H1-9 is substituted. In some embodiments, position H1-10 is substituted.

[1130] In some embodiments, the shortened hairpin 1 region has a length of 4 nucleotides. In some embodiments, the shortened hairpin 1 region has a length of 5 nucleotides. In some embodiments, the shortened hairpin 1 region has a length of 6 nucleotides. In further embodiments, the 4, 5, or 6 nucleotides of the shortened hairpin 1 region include less than or equal to 2 substitutions. In further embodiments, the 4, 5, or 6 nucleotides of the shortened hairpin 1 region include less than or equal to 1 substitution. In further embodiments, the 4, 5, or 6 nucleotides of the shortened hairpin 1 region are unsubstituted.

[1131] In some embodiments, position H1-1 is deleted. In some embodiments, position H1-1 is substituted. In some embodiments, position H1-2 is deleted. In some embodiments, position H1-2 is substituted. In some embodiments, position H1-3 is deleted. In some embodiments, position H1-3 is substituted. In some embodiments, position H1-4 is deleted. In some embodiments, position H1-4 is substituted. In some embodiments, position H1-5 is deleted. In some embodiments, position H1-5 is substituted. In some embodiments, position H1-6 is deleted. In some embodiments, position H1-6 is substituted. In some embodiments, position H1-7 is deleted. In some embodiments, position H1-7 is substituted. In some embodiments, position H1-8 is deleted. In some embodiments, position H1-8 is substituted. In some embodiments, position H1-9 is deleted. In some embodiments, position H1-9 is substituted. In some embodiments, position H1-10 is deleted. In some embodiments, position H1-10 is substituted. In some embodiments, position H1-11 is deleted. In some embodiments, position H1-11 is substituted. In some embodiments, position H1-12 is deleted. In some embodiments, position H1-12 is substituted.

[1132] In some embodiments, positions H1-1 through H1-2 are deleted. In some embodiments, positions H1-1 through H1-3 are deleted. In some embodiments, positions H1-1 through H1-4 are deleted. In some embodiments, positions H1-1 through H1-5 are deleted. In some embodiments, positions H1-1 through H1-6 are deleted. In some embodiments, positions H1-1 through H1-7 are deleted. In some embodiments, positions H1-1 through H1-8 are deleted. In some embodiments, positions H1-1 through H1-9 are deleted. In some embodiments, positions H1-1 through H1-10 are deleted.

[1133] In some embodiments, positions H1-2 through H1-3 are deleted. In some embodiments, positions H1-2 through H1-4 are deleted. In some embodiments, positions H1-2 through H1-5 are deleted. In some embodiments, positions H1-2 through H1-6 are deleted. In some embodiments, positions H1-2 through H1-7 are deleted. In some embodiments, positions H1-2 through H1-8 are deleted. In some embodiments, positions H1-2 through H1-9 are deleted. In some embodiments, positions H1-2 through H1-10 are deleted. In some embodiments, positions H1-2 through H1-11 are deleted.

[1134] In some embodiments, positions H1-3 through H1-4 are deleted. In some embodiments, positions H1-3 through H1-5 are deleted. In some embodiments, positions H1-3 through H1-6 are deleted. In some embodiments, positions H1-3 through H1-7 are deleted. In some embodiments, positions H1-3 through H1-8 are deleted. In some embodiments, positions H1-3 through H1-9 are deleted. In some embodiments, positions H1-3 through H1-10 are deleted. In some embodiments, positions H1-3 through H1-11 are deleted. In some embodiments, positions H1-3 through H1-12 are deleted.

[1135] In some embodiments, positions H1-4 through H1-5 are deleted. In some embodiments, positions H1-4 through H1-6 are deleted. In some embodiments, positions H1-4 through H1-7 are deleted. In some embodiments, positions H1-4 through H1-8 are deleted. In some embodiments, positions H1-4 through H1-9 are deleted. In some embodiments, positions H1-4 through H1-10 are deleted. In some embodiments, positions H1-4 through H1-11 are deleted. In some embodiments, positions H1-4 through H1-12 are deleted.

[1136] In some embodiments, positions H1-5 through H1-6 are deleted. In some embodiments, positions H1-5 through H1-7 are deleted. In some embodiments, positions H1-5 through H1-8 are deleted. In some embodiments, positions H1-5 through H1-9 are deleted. In some embodiments, positions H1-5 through H1-10 are deleted. In some embodiments, positions H1-5 through H1-11 are deleted. In some embodiments, positions H1-5 through H1-12 are deleted.

[1137] In some embodiments, positions H1-6 through H1-7 are deleted. In some embodiments, positions H1-6 through H1-8 are deleted. In some embodiments, positions H1-6 through H1-9 are deleted. In some embodiments, positions H1-6 through H1-10 are deleted. In some embodiments, positions H1-6 through H1-11 are deleted. In some embodiments, positions H1-6 through H1-12 are deleted.

[1138] In some embodiments, positions H1-7 through H1-8 are deleted. In some embodiments, positions H1-7 through H1-9 are deleted. In some embodiments, positions H1-7 through H1-10 are deleted. In some embodiments, positions H1-7 through H1-11 are deleted. In some embodiments, positions H1-7 through H1-12 are deleted.

[1139] In some embodiments, positions H1-8 through H1-9 are deleted. In some embodiments, positions H1-8 through H1-10 are deleted. In some embodiments, positions H1-8 through H1-11 are deleted. In some embodiments, positions H1-8 through H1-12 are deleted.

[1140] In some embodiments, positions H1-9 through H1-10 are deleted. In some embodiments, positions H1-9 through H1-11 are deleted. In some embodiments, positions H1-9 through H1-12 are deleted.

[1141] In some embodiments, positions H1-10 through H1-11 are deleted. In some embodiments, positions H1-10 through H1-12 are deleted.

[1142] In some embodiments, positions H1-11 through H1-12 are deleted.

[1143] In some embodiments, positions H1-2 through H1-4 and H1-9 through H1-11 are deleted. In some embodiments, the shortened hairpin 1 region comprises: (a) the sequence AGAAAU; (b) a sequence having less than or equal to 2 mismatches to the sequence of (a); or (c) a sequence having less than or equal to 1 mismatch to the sequence of (a).

[1144] In some embodiments, positions H1-2 through H1-5 and H1-9 through H1-11 are deleted. In further embodiments, each position of the upper stem region is modified. In some embodiments, 1, 2, 3, 4, 5, 6, 7, 8, 9, 10, or 11 positions of the upper stem region are modified. In some embodiments, all but 1, 2, 3, 4, 5, or 6 positions of the upper stem region are modified. In some embodiments, at least 20%, 30%, 40%, 50%, 60%, 70%, 80%, or 90% of the positions of the upper stem region are modified. Optionally, in any of the foregoing embodiments, each modified position of the upper stem region is modified by 2′-O-methylation. In further embodiments, the shortened hairpin 1 region comprises: (a) the sequence AAAAAU; (b) a sequence having less than or equal to 2 mismatches to the sequence of (a); or (c) a sequence having less than or equal to 1 mismatch to the sequence of (a).

[1145] In some embodiments, positions H1-2 through H1-5 and H1-8 through H1-11 are deleted. In further embodiments, each position of the upper stem region is modified. Optionally, each position of the upper stem region is modified by 2′-O-methylation. In further embodiments, the shortened hairpin 1 region comprises: (a) the sequence AAAU; (b) a sequence having less than or equal to 2 mismatches to the sequence of (a); or (c) a sequence having less than or equal to 1 mismatch to the sequence of (a).

[1146] In some embodiments, positions H1-1, H1-3 through H1-8, and H-12 are deleted. In further embodiments, each position of the upper stem region is modified. Optionally, each position of the upper stem region is modified by 2′-O-methylation. In further embodiments, the shortened hairpin 1 region comprises: (a) the sequence CAAG; (b) a sequence having less than or equal to 2 mismatches to the sequence of (a); or (c) a sequence having less than or equal to 1 mismatch to the sequence of (a).

[1147] In some embodiments, positions H1-2 through H1-8 are deleted. In further embodiments, each position of the upper stem region is modified. Optionally, each position of the upper stem region is modified by 2′-O-methylation. In further embodiments, the shortened hairpin 1 region comprises: (a) the sequence AAAGU; (b) a sequence having less than or equal to 2 mismatches to the sequence of (a); or (c) a sequence having less than or equal to 1 mismatch to the sequence of (a).

[1148] In some embodiments, positions H1-3 through H1-9 are deleted. In further embodiments, each position of the upper stem region is modified. Optionally, each position of the upper stem region is modified by 2′-O-methylation. In further embodiments, the shortened hairpin 1 region comprises: (a) the sequence ACAGU; (b) a sequence having less than or equal to 2 mismatches to the sequence of (a); or (c) a sequence having less than or equal to 1 mismatch to the sequence of (a).

[1149] In some embodiments, position H1-7 is substituted with a G. In some embodiments, position H1-8 is substituted with a C. In some embodiments, positions H1-7 and H1-8 are substituted positions. In some embodiments, H1-7 and H1-8 are substituted with a G and a C, respectively. In some embodiments, positions H1-7 and H1-8 are substituted with a G and a C, respectively, and positions H1-2 through H1-4 and H1-9 through H1-11 are deleted. In further embodiments, the shortened hairpin 1 region comprises: (a) the sequence AGAGCU; (b) a sequence having less than or equal to 2 mismatches to the sequence of (a); or (c) a sequence having less than or equal to 1 mismatch to the sequence of (a).

[1150] In some embodiments, position H1-6 is substituted with a G. In some embodiments, position H1-7 is substituted with a U. In some embodiments, positions H1-6 and H1-7 are substituted positions. In some embodiments, positions H1-6 and H1-7 are substituted with a G and a U, respectively. In some embodiments, positions H1-6 and H1-7 are substituted with a G and a C, respectively, and positions H1-2 through H1-4 and H1-9 through H1-11 are deleted. In further embodiments, the shortened hairpin 1 region comprises: (a) the sequence AGCUAU; (b) a sequence having less than or equal to 2 mismatches to the sequence of (a); or (c) a sequence having less than or equal to 1 mismatch to the sequence of (a).

[1151] In some embodiments, position H1-1 is substituted with a C. In some embodiments, position H1-12 is substituted with a G. In some embodiments, positions H1-1 and H1-12 are substituted positions. In some embodiments, positions H1-1 and H1-12 are substituted with a C and a G, respectively. In some embodiments, positions H1-1 and H1-12 are substituted with a C and a G, respectively, and positions H1-2 through H1-4 and H1-9 through H1-11 are deleted. In further embodiments, each position of the upper stem region is modified. Optionally, each position of the upper stem region is modified by 2′-O-methylation. In further embodiments, the shortened hairpin 1 region comprises: (a) the sequence CGAAAG; (b) a sequence having less than or equal to 2 mismatches to the sequence of (a); or (c) a sequence having less than or equal to 1 mismatch to the sequence of (a).

[1152] In some embodiments, the shortened hairpin 1 region lacks 9-10 nucleotides. In some embodiments, the shortened hairpin 1 region has a length of 2 nucleotides. In some embodiments, the shortened hairpin 1 region has a length of 3 nucleotides. In further embodiments, the 2 or 3 nucleotides of the shortened hairpin 1 region are unsubstituted.

[1153] In some embodiments, position H1-1 is deleted. In some embodiments, position H1-12 is deleted. In some embodiments, positions H1-11 through H1-12 are deleted. In further embodiments, positions H1-1 through H1-8 and H1-11 through H1-12 are deleted. In further embodiments, the shortened hairpin 1 region comprises: (a) the sequence AA; (b) a sequence having less than or equal to 1 mismatch to the sequence of (a).

[1154] In some embodiments, positions H1-11 through H1-9 are deleted. In further embodiments, the shortened hairpin 1 region comprises: (a) the sequence AG; (b) a sequence having less than or equal to 1 mismatch to the sequence of (a).

[1155] In some embodiments, the shortened hairpin 1 region lacks 5-10 nucleotides. In some embodiments, the shortened hairpin 1 region lacks 5-10 nucleotides and one or more of positions N18, H1-12, or N is substituted relative to SEQ ID NO: 400. In some embodiments, the shortened hairpin 1 region has a length of 2 nucleotides. In some embodiments, the shortened hairpin 1 region has a length of 3 nucleotides. In some embodiments, the shortened hairpin 1 region has a length of 4 nucleotides. In some embodiments, the shortened hairpin 1 region has a length of 5 nucleotides. In some embodiments, the shortened hairpin 1 region has a length of 6 nucleotides. In some embodiments, the shortened hairpin 1 region has a length of 7 nucleotides. In further embodiments, positions H1-4 through H1-11 are deleted.

[1156] In some embodiments, a conserved portion of an gRNA described herein further comprises a shortened hairpin 1 region lacking 5-10 nucleotides wherein one or more nucleotide is deleted.

[1157] In some embodiments, position N18 is substituted. In further embodiments, position N18 is substituted with a C. In further embodiments, position N18 is substituted with a C and positions H1-4 through H1-11 are deleted. In further embodiments, the gRNA comprises a segment containing position N18, the shortened hairpin 1 region, and position N, and the segment comprises: (a) the sequence CACUUG; (b) a sequence having less than or equal to 2 mismatches to the sequence of (a); or (c) a sequence having less than or equal to 1 mismatch to the sequence of (a).

[1158] In some embodiments, position H1-12 is substituted. In some embodiments, position H1-12 is substituted with a C. In further embodiments, position H1-12 is substituted with an A. In some embodiments, position N is substituted. In further embodiments, position N is substituted with an A. In further embodiments, position H1-12 is substituted with a C and position N is substituted with an A. In further embodiments, position H1-12 is substituted with a C, position N is substituted with an A, and positions H1-4 through H1-11 are deleted. In further embodiments, the gRNA comprises a segment containing position N18, the shortened hairpin 1 region, and position N, and the segment comprises: (a) the sequence AACUCA; (b) a sequence having less than or equal to 2 mismatches to the sequence of (a); or (c) a sequence having less than or equal to 1 mismatch to the sequence of (a).

[1159] In some embodiments, position H1-12 is substituted with an A and position N is substituted with an A. In further embodiments, position H1-12 is substituted with an A, position N is substituted with an A, and positions H1-4 through H1-11 are deleted. In further embodiments, the gRNA comprises a segment containing position N18, the shortened hairpin 1 region, and position N, and the segment comprises: (a) the sequence AACUAA; (b) a sequence having less than or equal to 2 mismatches to the sequence of (a); or (c) a sequence having less than or equal to 1 mismatch to the sequence of (a).

[1160] Shortened Upper Stem Region

[1161] In some embodiments, a conserved portion of an gRNA described herein a shortened upper stem region. In some embodiments, the shortened upper stem region lacks 1-6 nucleotides. In some embodiments, the upper stem region may comprise a loop (e.g., a tetraloop), and the length of the upper stem region includes nucleotides in the loop. In some embodiments, the shortened upper stem region has a length of 6 nucleotides. In some embodiments, the shortened upper stem region has a length of 7 nucleotides. In some embodiments, the shortened upper stem region has a length of 8 nucleotides. In some embodiments, the shortened upper stem region has a length of 9 nucleotides. In some embodiments, the shortened upper stem region has a length of 10 nucleotides. In some embodiments, the shortened upper stem region has a length of 11 nucleotides. In further embodiments, the 6, 7, 8, 9, 10, or 11 nucleotides of the shortened upper stem region include less than or equal to 4 substitutions, less than or equal to 2 substitutions, or one substitution. In further embodiments, the 6, 7, 8, 9, 10, or 11 nucleotides of the shortened upper stem region are unsubstituted.

[1162] In some embodiments, one or more of positions US3, US4, US5, US8, US9, or US10 is deleted. In some embodiments, position US3 is deleted. In some embodiments, position US4 is deleted. In some embodiments, position US5 is deleted. In some embodiments, position US8 is deleted. In some embodiments, position US9 is deleted. In some embodiments, position US10 is deleted. It should be noted that in sequences such as SEQ ID NO: 400, where US6, US7, and US8 are each A residues, deletions of any one of US 6, US7, and US8 are equivalent.

[1163] In some embodiments, positions US4 and US9 are deleted. In further embodiments, positions H1-2 through H1-5 and H1-8 through H1-11 are deleted. In further embodiments, the shortened upper stem region comprises: (a) the sequence GCUGAAAGGC (SEQ ID NO: 1004); (b) a sequence having less than or equal to 2 mismatches to the sequence of (a); or (c) a sequence having less than or equal to 1 mismatch to the sequence of (a).

[1164] In some embodiments, positions US3 and US4 are deleted. In some embodiments, positions US9 and US10 are deleted. In some embodiments, positions US3, US4, US9, and US10 are deleted.

[1165] In some embodiments, a conserved portion of an gRNA having a shortened upper stem region described herein further comprises a shortened hairpin region 1. In further embodiments, positions H1-2 through H1-5 and H1-8 through H1-11 are deleted. In further embodiments, positions H1-2 through H1-5 and H-12 are deleted. In further embodiments, the shortened upper stem region comprises: (a) the sequence GCGAAAGC; (b) a sequence having less than or equal to 2 mismatches to the sequence of (a); or (c) a sequence having less than or equal to 1 mismatch to the sequence of (a). In further embodiments, positions H1 and H1-4 through H1-12 are deleted.

[1166] In some embodiments, positions US3, US4, US8, US9, and US10 are deleted. In further embodiments, the shortened upper stem region comprises: (a) the sequence GCGAAGC; (b) a sequence having less than or equal to 2 mismatches to the sequence of (a); or (c) a sequence having less than or equal to 1 mismatch to the sequence of (a).

[1167] In some embodiments, positions US3, US4, US5, US9, and US10 are deleted. In further embodiments, the shortened upper stem region comprises: (a) the sequence GCAAAGC (SEQ ID NO: 1005); (b) a sequence having less than or equal to 2 mismatches to the sequence of (a); or (c) a sequence having less than or equal to 1 mismatch to the sequence of (a).

[1168] In some embodiments, position US3 is substituted, optionally with a G. In some embodiments, position US4 is substituted, optionally with a C. In some embodiments, position US9 is substituted, optionally with a G. In some embodiments, position US10 is substituted, optionally with a C.

[1169] In some embodiments, positions US3 and US10 are substituted, optionally with a G and a C, respectively. In some embodiments, positions US4 and US9 are substituted, optionally with a C and a G, respectively.

[1170] In some embodiments, positions US3 and US10 are substituted with a G and a C, respectively, and positions US4 and US9 are substituted with a C and a G, respectively. In some embodiments, position US5 is deleted. In some embodiments, positions US3 and US10 are substituted with a G and a C, respectively, and positions US4 and US9 are substituted with a C and a G, respectively, and position US8 is deleted. Optionally, instead of deletion of position US8, one of position US6 or US7 may be deleted as US6, US7, US8 each comprise an A. In some embodiments, positions H1-2 through H1-5 and H1-8 through H1-11 are deleted. In further embodiments, shortened upper stem region comprises: (a) the sequence GCGCGAAGCGC; (b) a sequence having less than or equal to 2 mismatches to the sequence of (a); or (c) a sequence having less than or equal to 1 mismatch to the sequence of (a).

[1171] In some embodiments, positions US3 and US10 are substituted with a C and a G, respectively. In some embodiments, positions US3 and US10 are substituted with a C and a G, respectively, and positions US4 and US9 are deleted. In some embodiments, the shortened upper stem region comprises: (a) the sequence GCGGAAACGC (SEQ ID NO: 1006); (b) a sequence having less than or equal to 2 mismatches to the sequence of (a); or (c) a sequence having less than or equal to 1 mismatch to the sequence of (a).

[1172] In some embodiments, positions US3 and US10 are substituted with a G and a C, respectively, and positions US4 and US9 are deleted. In some embodiments, the shortened upper stem region comprises: (a) the sequence GCCGAAAGGC (SEQ ID NO: 1007); (b) a sequence having less than or equal to 2 mismatches to the sequence of (a); or (c) a sequence having less than or equal to 1 mismatch to the sequence of (a).

[1173] YA Site Substitutions and Modifications

[1174] In some embodiments, a conserved portion of an gRNA described herein has a substitution relative to SEQ ID NO: 400 at any one or more of LS6, LS7, US3, US10, B3, N7, N15, N17, H2-2 and H2-14. The substituent nucleotide is neither a pyrimidine that is followed by an adenine, nor an adenine that is preceded by a pyrimidine.

[1175] In some embodiments, one of positions LS6, LS7, US3, US10, B3, N7, N15, N17, H2-2 and H2-14 is substituted. In some embodiments, position LS6 is substituted. In some embodiments, position LS7 is substituted. In some embodiments, position US3 is substituted. In some embodiments, position US10 is substituted. In some embodiments, position B3 is substituted, optionally with a G. In some embodiments, position N7 is substituted, optionally with a C or with a U. In some embodiments, position N15 is substituted, optionally with a C or with a U. In some embodiments, position N17 is substituted, optionally with a G. In some embodiments, position H2-2 is substituted. In some embodiments, position H-14 is substituted.

[1176] In some embodiments, two of positions LS6, LS7, US3, US10, B3, N7, N15, N17, H2-2 and H2-14 is substituted. In some embodiments, positions LS 6 and LS7 are substituted, optionally with a U and an A, respectively. In some embodiments, positions US3 and US10 are substituted, optionally with a G and a C, respectively. In some embodiments, positions H2-2 and H2-14 are substituted, optionally with an A and a U, respectively. In some embodiments, positions H2-2 and H2-14 are substituted, optionally with a G and a C, respectively.

[1177] In some embodiments, at least 2, 3, 4, 5, 6, 7, or 8 of positions US3, US10, LS6, LS7, B3, N15, N17, H2-2, and H2-14 are substituted. In some embodiments, positions US3, US10, LS6, LS7, B3, N15, N17, H2-2, and H2-14 are substituted.

[1178] In some embodiments, at least 2, 3, 4, 5, or all of the following are true:

(a) positions US3 and US10 are substituted with a G and a C, respectively;
(b) positions LS 6 and LS7 are substituted with a U and an A, respectively;
(c) position B3 is substituted with a G;
(d) position N15 is substituted with a C;
(e) position N17 is substituted with a G; and/or
(f) positions H2-2 and H2-14 are substituted with an A and a U, respectively.

[1179] In some embodiments, a conserved portion of an gRNA described herein has both a shortened upper stem region described herein and a shortened hairpin 1 region.

[1180] In some embodiments, positions H1-4 through H1-11 are deleted. In further embodiments, the shortened hairpin 1 region comprises: (a) the sequence ACUU; (b) a sequence having less than or equal to 2 mismatches to the sequence of (a); or (c) a sequence having less than or equal to 1 mismatch to the sequence of (a).

[1181] In some embodiments, position N2 is substituted with a C. In some embodiments, positions US1-US4 and US9-US12 are deleted. Optionally, positions H1-2 through H1-11 are deleted. Optionally, positions H1-4 through H1-11 are deleted.

[1182] In some embodiments, positions US2-US4 and US9-US11 are deleted. In further embodiments, positions H1-2 to H1-11 are deleted or positions H1-1 and H1-4 through H1-12 are deleted.

[1183] In some embodiments, a conserved portion of an gRNA described herein comprises both a shortened upper stem region described herein and a hairpin 1 region truncation (i.e., positions H1-1 through H1-12 are deleted).

[1184] In some embodiment a conserved portion of an gRNA described herein further comprises one or more of the following deletions in the upper stem region. In some embodiments, positions US3-US5 and US8-US10 are deleted. In some embodiments, positions US3-US4 and US7-US10 are deleted. In further embodiments, positions US3-US10 are deleted. In further embodiments, positions US2-US5 and US8-US11 are deleted. In further embodiments, positions US2-US6 and US8-US11 are deleted. In further embodiments, positions US2-US11 are deleted. In further embodiments, positions US1-US5 and US8-US12 are deleted. In further embodiments, positions US1-US5 and US7-US12 are deleted.

[1185] In some embodiments, a conserved portion of an gRNA described herein further comprises a shortened hairpin 2 region. In some embodiments, position H2-15 is deleted. In some embodiments, positions H2-14 and H2-15 are deleted.

[1186] In some embodiments, a conserved portion of an gRNA described herein further comprises one or more deletion or substitution in a nexus region, a lower stem region, or a bulge region. In some embodiments, position N6 is deleted, optionally wherein positions H1-4 through H1-11 are deleted. In some embodiments, position LS6 is substituted, optionally with a C. In some embodiments, position B3 is substituted, optionally with a C. In some embodiments, position N1 is substituted, optionally with a C. In some embodiments, N7 is substituted, optionally with a G. In some embodiments, position N15 is substituted, optionally with a G. In some embodiments, position N17 is substituted with a non-pyrimidine, optionally with a G.

Modified Guide RNA (gRNA)

[1187] In some embodiments, a gRNA described herein is modified. The term “modified” or “modification” in the context of a gRNA described herein includes the modifications described above, including, for example, (a) end modifications, e.g., 5′ end modifications or 3′ end modifications, including 5′ or 3′ protective end modifications, (b) nucleobase (or “base”) modifications, including replacement or removal of bases, (c) sugar modifications, including modifications at the 2′, 3′, and/or 4′ positions, (d) internucleoside linkage modifications, and (e) backbone modifications, which can include modification or replacement of the phosphodiester linkages and/or the ribose sugar. A modification of a nucleotide at a given position includes a modification or replacement of the phosphodiester linkage immediately 3′ of the sugar of the nucleotide. Thus, for example, a nucleic acid comprising a phosphorothioate between the first and second sugars from the 5′ end is considered to comprise a modification at position 1. The term “modified gRNA” generally refers to a gRNA having a modification to the chemical structure of one or more of the base, the sugar, and the phosphodiester linkage or backbone portions, including nucleotide phosphates, all as detailed and exemplified herein.

[1188] Exemplary patterns of modifications are shown in Table 1. Additional exemplary patterns are discussed below.

[1189] Modifications of Guide Regions and/or YA Sites

[1190] In some embodiments, a gRNA comprises modifications at 1, 2, 3, 4, 5, 6, 7, 8, 9, 10, 11, 12, 13, 14, 15, 16, or more YA sites. In some embodiments, the pyrimidine of the YA site comprises a modification (which includes a modification altering the internucleoside linkage immediately 3′ of the sugar of the pyrimidine). In some embodiments, the adenine of the YA site comprises a modification (which includes a modification altering the internucleoside linkage immediately 3′ of the sugar of the adenine). In some embodiments, the pyrimidine and the adenine of the YA site comprise modifications, such as sugar, base, or internucleoside linkage modifications. The YA modifications can be any of the types of modifications set forth herein. In some embodiments, the YA modifications comprise one or more of phosphorothioate, 2′-OMe, or 2′-fluoro. In some embodiments, the YA modifications comprise pyrimidine modifications comprising one or more of phosphorothioate, 2′-OMe, 2′-H, inosine, or 2′-fluoro. In some embodiments, the YA modification comprises a bicyclic ribose analog (e.g., an LNA, BNA, or ENA) within an RNA duplex region that contains one or more YA sites. In some embodiments, the YA modification comprises a bicyclic ribose analog (e.g., an LNA, BNA, or ENA) within an RNA duplex region that contains a YA site, wherein the YA modification is distal to the YA site.

[1191] Guide Region Modifications, Including YA Site Modifications

[1192] In some embodiments, the guide region comprises 1, 2, 3, 4, 5, or more YA sites (“guide region YA sites”) that may comprise YA modifications. In some embodiments, one or more YA sites located at 5-end, 6-end, 7-end, 8-end, 9-end, or 10-end from the 5′ end of the 5′ terminus (where “5-end”, etc., refers to position 5 to the 3′ end of the guide region, i.e., the most 3′ nucleotide in the guide region) comprise YA modifications. In some embodiments, two or more YA sites located at 5-end, 6-end, 7-end, 8-end, 9-end, or 10-end from the 5′ end of the 5′ terminus comprise YA modifications. In some embodiments, three or more YA sites located at 5-end, 6-end, 7-end, 8-end, 9-end, or 10-end from the 5′ end of the 5′ terminus comprise YA modifications. In some embodiments, four or more YA sites located at 5-end, 6-end, 7-end, 8-end, 9-end, or 10-end from the 5′ end of the 5′ terminus comprise YA modifications. In some embodiments, five or more YA sites located at 5-end, 6-end, 7-end, 8-end, 9-end, or 10-end from the 5′ end of the 5′ terminus comprise YA modifications. A modified guide region YA site comprises a YA modification.

[1193] In some embodiments, a modified guide region YA site is within 17, 16, 15, 14, 13, 12, 11, 10, or 9 nucleotides of the 3′ terminal nucleotide of the guide region. For example, if a modified guide region YA site is within 10 nucleotides of the 3′ terminal nucleotide of the guide region and the guide region is 20 nucleotides long, then the modified nucleotide of the modified guide region YA site is located at any of positions 11-20. In some embodiments, a YA modification is located within a YA site 20, 19, 18, 17, 16, 15, 14, 13, 12, 11, 10, 9, 8, 7, 6, 5, 4, 3, 2, or 1 nucleotides from the 3′ terminal nucleotide of the guide region. In some embodiments, a YA modification is located 20, 19, 18, 17, 16, 15, 14, 13, 12, 11, 10, 9, 8, 7, 6, 5, 4, 3, 2, or 1 nucleotides from the 3′ terminal nucleotide of the guide region.

[1194] In some embodiments, a modified guide region YA site is at or after nucleotide 4, 5, 6, 7, 8, 9, 10, or 11 from the 5′ end of the 5′ terminus.

[1195] In some embodiments, a modified guide region YA site is other than a 5′ end modification. For example, a gRNA can comprise a 5′ end modification as described herein and further comprise a modified guide region YA site. Alternatively, a gRNA can comprise an unmodified 5′ end and a modified guide region YA site. Alternatively, a gRNA can comprise a modified 5′ end and an unmodified guide region YA site.

[1196] In some embodiments, a modified guide region YA site comprises a modification that at least one nucleotide located 5′ of the guide region YA site does not comprise. For example, if nucleotides 1-3 comprise phosphorothioates, nucleotide 4 comprises only a 2′-OMe modification, and nucleotide 5 is the pyrimidine of a YA site and comprises a phosphorothioate, then the modified guide region YA site comprises a modification (phosphorothioate) that at least one nucleotide located 5′ of the guide region YA site (nucleotide 4) does not comprise. In another example, if nucleotides 1-3 comprise phosphorothioates, and nucleotide 4 is the pyrimidine of a YA site and comprises a 2′-OMe, then the modified guide region YA site comprises a modification (2′-OMe) that at least one nucleotide located 5′ of the guide region YA site (any of nucleotides 1-3) does not comprise. This condition is also always satisfied if an unmodified nucleotide is located 5′ of the modified guide region YA site.

[1197] In some embodiments, the modified guide region YA sites comprise modifications as described for YA sites above.

[1198] Additional embodiments of guide region modifications, including guide region YA site modifications, are set forth elsewhere herein, including in the summary above and in the discussion of gRNAs comprising modifications, including modifications at YA sites above, and elsewhere herein. The guide region of a gRNA may be modified according to any embodiment comprising a modified guide region set forth herein. Any embodiments set forth elsewhere in this disclosure may be combined to the extent feasible with any of the foregoing embodiments.

[1199] Conserved Region YA Site Modifications

[1200] Conserved region YA sites 1-10 are illustrated in FIG. 1C. In some embodiments, 1, 2, 3, 4, 5, 6, 7, 8, 9, or 10 conserved region YA sites comprise modifications.

[1201] In some embodiments, conserved region YA sites 1, 8, or 1 and 8 comprise YA modifications. In some embodiments, conserved region YA sites 1, 2, 3, 4, and 10 comprise YA modifications. In some embodiments, YA sites 2, 3, 4, 8, and 10 comprise YA modifications. In some embodiments, conserved region YA sites 1, 2, 3, and 10 comprise YA modifications. In some embodiments, YA sites 2, 3, 8, and 10 comprise YA modifications. In some embodiments, YA sites 1, 2, 3, 4, 8, and 10 comprise YA modifications. In some embodiments, 1, 2, 3, 4, 5, 6, 7, or 8 additional conserved region YA sites comprise YA modifications.

[1202] In some embodiments, 1, 2, 3, or 4 of conserved region YA sites 2, 3, 4, and 10 comprise YA modifications. In some embodiments, 1, 2, 3, 4, 5, 6, 7, or 8 additional conserved region YA sites comprise YA modifications.

[1203] In some embodiments, the modified conserved region YA sites comprise modifications as described for YA sites above.

[1204] Additional embodiments of conserved region YA site modifications are set forth in the summary above. Any embodiments set forth elsewhere in this disclosure may be combined to the extent feasible with any of the foregoing embodiments.

[1205] Modifications to Terminal Nucleotides

[1206] In some embodiments, the 5′ and/or 3′ terminus regions of a gRNA are modified.

[1207] 3′ Terminus Region Modifications

[1208] In some embodiments, the terminal (i.e., last) 1, 2, 3, 4, 5, 6, or 7 nucleotides in the 3′ terminus region are modified. Throughout, this modification may be referred to as a “3′ end modification”. In some embodiments, the terminal (i.e., last) 1, 2, 3, 4, 5, 6, or 7 nucleotides in the 3′ terminus region comprise more than one modification. In some embodiments, at least one of the terminal (i.e., last) 1, 2, 3, 4, 5, 6, or 7 nucleotides in the 3′ terminus region are modified. In some embodiments, at least two of the terminal (i.e., last) 1, 2, 3, 4, 5, 6, or 7 nucleotides in the 3′ terminus region are modified. In some embodiments, at least three of the terminal (i.e., last) 1, 2, 3, 4, 5, 6, or 7 nucleotides in the 3′ terminus region are modified. In some embodiments, the modification comprises a PS linkage. In some embodiments, the modification to the 3′ terminus region is a 3′ protective end modification. In some embodiments, the 3′ end modification comprises a 3′ protective end modification.

[1209] In some embodiments, the 3′ end modification comprises a modified nucleotide selected from 2′-O-methyl (2′-O-Me) modified nucleotide, 2′-O-(2-methoxyethyl) (2′-O-moe) modified nucleotide, a 2′-fluoro (2′-F) modified nucleotide, a phosphorothioate (PS) linkage between nucleotides, an inverted abasic modified nucleotide, or combinations thereof.

[1210] In some embodiments, the 3′ end modification comprises or further comprises a 2′-O-methyl (2′-O-Me) modified nucleotide.

[1211] In some embodiments, the 3′ end modification comprises or further comprises a 2′-fluoro (2′-F) modified nucleotide.

[1212] In some embodiments, the 3′ end modification comprises or further comprises a phosphorothioate (PS) linkage between nucleotides.

[1213] In some embodiments, the 3′ end modification comprises or further comprises an inverted abasic modified nucleotide.

[1214] In some embodiments, the 3′ end modification comprises or further comprises a modification of any one or more of the last 7, 6, 5, 4, 3, 2, or 1 nucleotides. In some embodiments, the 3′ end modification comprises or further comprises one modified nucleotide. In some embodiments, the 3′ end modification comprises or further comprises two modified nucleotides. In some embodiments, the 3′ end modification comprises or further comprises three modified nucleotides. In some embodiments, the 3′ end modification comprises or further comprises four modified nucleotides. In some embodiments, the 3′ end modification comprises or further comprises five modified nucleotides. In some embodiments, the 3′ end modification comprises or further comprises six modified nucleotides. In some embodiments, the 3′ end modification comprises or further comprises seven modified nucleotides.

[1215] In some embodiments, the 3′ end modification comprises or further comprises a modification of between 1 and 7 or between 1 and 5 nucleotides.

[1216] In some embodiments, the 3′ end modification comprises or further comprises modifications of 1, 2, 3, 4, 5, 6, or 7 nucleotides at the 3′ end of the gRNA.

[1217] In some embodiments, the 3′ end modification comprises or further comprises modifications of about 1-3, 1-5, 1-6, or 1-7 nucleotides at the 3′ end of the gRNA.

[1218] In some embodiments, the 3′ end modification comprises or further comprises any one or more of the following: a phosphorothioate (PS) linkage between nucleotides, a 2′-0-Me modified nucleotide, a 2′-O-moe modified nucleotide, a 2′-F modified nucleotide, an inverted abasic modified nucleotide, and a combination thereof.

[1219] In some embodiments, the 3′ end modification comprises or further comprises 1, 2, 3, 4, 5, 6, or 7 PS linkages between nucleotides.

[1220] In some embodiments, the 3′ end modification comprises or further comprises at least one 2′-O-Me, 2′-O-moe, inverted abasic, or 2′-F modified nucleotide. In some embodiments, the 3′ end modification comprises or further comprises one PS linkage, wherein the linkage is between the last and second to last nucleotide. In some embodiments, the 3′ end modification comprises or further comprises two PS linkages between the last three nucleotides. In some embodiments, the 3′ end modification comprises or further comprises four PS linkages between the last four nucleotides.

[1221] In some embodiments, the 3′ end modification comprises or further comprises PS linkages between any one or more of the last four nucleotides. In some embodiments, the 3′ end modification comprises or further comprises PS linkages between any one or more of the last five nucleotides. In some embodiments, the 3′ end modification comprises or further comprises PS linkages between any one or more of the last 2, 3, 4, 5, 6, or 7 nucleotides.

[1222] In some embodiments, the 3′ end modification comprises or further comprises a modification of one or more of the last 1-7 nucleotides, wherein the modification is a PS linkage, inverted abasic nucleotide, 2′-OMe, 2′-O-moe, 2′-F, or combinations thereof.

[1223] In some embodiments, the 3′ end modification comprises or further comprises a modification to the last nucleotide with 2′-OMe, 2′-O-moe, 2′-F, or combinations thereof, and an optionally one or two PS linkages to the next nucleotide and/or the first nucleotide of the 3′ tail.

[1224] In some embodiments, the 3′ end modification comprises or further comprises a modification to the last and/or second to last nucleotide with 2′-OMe, 2′-O-moe, 2′-F, or combinations thereof, and optionally one or more PS linkages.

[1225] In some embodiments, the 3′ end modification comprises or further comprises a modification to the last, second to last, and/or third to last nucleotides with 2′-OMe, 2′-O-moe, 2′-F, or combinations thereof, and optionally one or more PS linkages.

[1226] In some embodiments, the 3′ end modification comprises or further comprises a modification to the last, second to last, third to last, and/or fourth to last nucleotides with 2′-OMe, 2′-O-moe, 2′-F, or combinations thereof, and optionally one or more PS linkages.

[1227] In some embodiments, the 3′ end modification comprises or further comprises a modification to the last, second to last, third to last, fourth to last, and/or fifth to last nucleotides with 2′-OMe, 2′-O-moe, 2′-F, or combinations thereof, and optionally one or more PS linkages.

[1228] In some embodiments, the gRNA comprising a 3′ end modification comprises or further comprises a 3′ tail, wherein the 3′ tail comprises a modification of any one or more of the nucleotides present in the 3′ tail. In some embodiments, the 3′ tail is fully modified. In some embodiments, the 3′ tail comprises 1, 2, 3, 4, 5, 6, 7, 8, 9, 10, 1-2, 1-3, 1-4, 1-5, 1-6, 1-7, 1-8, 1-9, or 1-10 nucleotides, optionally where any one or more of these nucleotides are modified.

[1229] In some embodiments, a gRNA is provided comprising a 3′ end modification, wherein the 3′ end modification comprises the 3′ end modification as shown in any one of SEQ ID NOs: 101-190 or 795-798. In some embodiments, a gRNA is provided comprising a 3′ protective end modification.

[1230] In some embodiments, a gRNA is provided comprising a 3′ end modification, wherein the 3′ end modification comprises (i) a 2′-OMe modified nucleotide at the last nucleotide of the conserved region of an gRNA (ii) three consecutive 2′O-moe modified nucleotides immediately 5′ to the 2′-OMe modified nucleotide, and (iii) three consecutive PS linkages between the last three nucleotides.

[1231] In some embodiments, a gRNA is provided comprising a 3′ end modification, wherein the 3′ end modification comprises (i) five consecutive 2′-OMe modified nucleotides from the last nucleotide of the conserved region of an sgRNA or the conserved region of a gRNA, and (ii) three PS linkages between the last three nucleotides.

[1232] In some embodiments, a gRNA is provided comprising a 3′ end modification, wherein the 3′ end modification comprises an inverted abasic modified nucleotide at the last nucleotide of the conserved region of an sgRNA or the conserved region of a gRNA.

[1233] In some embodiments, a gRNA is provided comprising a 3′ end modification, wherein the 3′ end modification comprises (i) an inverted abasic modified nucleotide at the last nucleotide of the conserved region of a gRNA, and (ii) three consecutive 2′-OMe modified nucleotides at the last three nucleotides of the conserved region of a gRNA or the conserved region of a gRNA.

[1234] In some embodiments, a gRNA is provided comprising (i) 15 consecutive 2′-OMe modified nucleotides from the last nucleotide of the conserved region of a gRNA, (ii) five consecutive 2′-F modified nucleotides immediately 5′ to the 2′-OMe modified nucleotides, and (iii) three PS linkages between the last three nucleotides.

[1235] In some embodiments, a gRNA is provided comprising (i) alternating 2′-OMe modified nucleotides and 2′-F modified nucleotides at the last 20 nucleotides of the conserved region of a gRNA, and (ii) three PS linkages between the last three nucleotides.

[1236] In some embodiments, a gRNA is provided comprising a 3′ end modification, wherein the 3′ end modification comprises (i) two or three consecutive 2′-OMe modified nucleotides, and (ii) three PS linkages between the last three nucleotides.

[1237] In some embodiments, a gRNA is provided comprising a 3′ end modification, wherein the 3′ end modification comprises one PS linkage between the last and next to last nucleotides.

[1238] In some embodiments, a gRNA is provided comprising (i) 15 or 20 consecutive 2′-OMe modified nucleotides, and (ii) three PS linkages between the last three nucleotides.

[1239] In some embodiments, the gRNA comprises a 5′ end modification and a 3′ end modification.

### 3′ Tail

[1240] In some embodiments, the gRNA comprises a 3′ terminus comprising a 3′ tail, which follows and is 3′ of the conserved portion of a gRNA. In some embodiments, the 3′ tail comprises between 1 and about 20 nucleotides, between 1 and about 15 nucleotides, between 1 and about 10 nucleotides, between 1 and about 5 nucleotides, between 1 and about 4 nucleotides, between 1 and about 3 nucleotides, and between 1 and about 2 nucleotides. In some embodiments, the 3′ tail comprises about 1, 2, 3, 4, 5, 6, 7, 8, 9, or 10 nucleotides. In some embodiments, the 3′ tail comprises 1, 2, 3, 4, 5, 6, 7, 8, 9, or 10 nucleotides. In some embodiments, the 3′ tail comprises 1 nucleotide. In some embodiments, the 3′ tail comprises 2 nucleotides. In some embodiments, the 3′ tail comprises 3 nucleotides. In some embodiments, the 3′ tail comprises 4 nucleotides. In some embodiments, the 3′ tail comprises about 1-2, 1-3, 1-4, 1-5, 1-7, 1-10, at least 1-5, at least 1-3, at least 1-4, at least 1-5, at least 1-5, at least 1-7, or at least 1-10 nucleotides.

[1241] In some embodiments, the 3′ tail comprising between 1 and 20 nucleotides and follows the 3′ end of the conserved portion of a gRNA.

[1242] In some embodiments, the 3′ tail comprises or further comprises one or more of a protective end modification, a phosphorothioate (PS) linkage between nucleotides, a 2′-OMe modified nucleotide, a 2′-O-moe modified nucleotide, a 2′-F modified nucleotide, an inverted abasic modified nucleotide, and a combination thereof.

[1243] In some embodiments, the 3′ tail comprises or further comprises one or more phosphorothioate (PS) linkages between nucleotides. In some embodiments, the 3′ tail comprises or further comprises one or more 2′-OMe modified nucleotides. In some embodiments, the 3′ tail comprises or further comprises one or more 2′-O-moe modified nucleotides. In some embodiments, the 3′ tail comprises or further comprises one or more 2′-F modified nucleotide. In some embodiments, the 3′ tail comprises or further comprises one or more an inverted abasic modified nucleotides. In some embodiments, the 3′ tail comprises or further comprises one or more protective end modifications. In some embodiments, the 3′ tail comprises or further comprises a combination of one or more of a phosphorothioate (PS) linkage between nucleotides, a 2′-OMe modified nucleotide, a 2′-O-moe modified nucleotide, a 2′-F modified nucleotide, and an inverted abasic modified nucleotide.

[1244] In some embodiments, the gRNA does not comprise a 3′ tail.

[1245] 5′ Terminus Region Modifications

[1246] In some embodiments, the 5′ terminus region is modified, for example, the first 1, 2, 3, 4, 5, 6, or 7 nucleotides of the gRNA are modified. Throughout, this modification may be referred to as a “5′ end modification”. In some embodiments, the first 1, 2, 3, 4, 5, 6, or 7 nucleotides of the 5′ terminus region comprise more than one modification. In some embodiments, at least one of the terminal (i.e., first) 1, 2, 3, 4, 5, 6, or 7 nucleotides at the 5′ end are modified. In some embodiments, at least two of the terminal 1, 2, 3, 4, 5, 6, or 7 nucleotides at the 5′ terminus region are modified. In some embodiments, at least three of the terminal 1, 2, 3, 4, 5, 6, or 7 nucleotides at the 5′ terminus region are modified. In some embodiments, the 5′ end modification is a 5′ protective end modification.

[1247] In some embodiments, both the 5′ and 3′ terminus regions (e.g., ends) of the gRNA are modified. In some embodiments, only the 5′ terminus region of the gRNA is modified. In some embodiments, only the 3′ terminus region (plus or minus a 3′ tail) of the conserved portion of a gRNA is modified.

[1248] In some embodiments, the gRNA comprises modifications at 1, 2, 3, 4, 5, 6, or 7 of the first 7 nucleotides at a 5′ terminus region of the gRNA. In some embodiments, the gRNA comprises modifications at 1, 2, 3, 4, 5, 6, or 7 of the 7 terminal nucleotides at a 3′ terminus region. In some embodiments, 2, 3, or 4 of the first 4 nucleotides at the 5′ terminus region, and/or 2, 3, or 4 of the terminal 4 nucleotides at the 3′ terminus region are modified. In some embodiments, 2, 3, or 4 of the first 4 nucleotides at the 5′ terminus region are linked with phosphorothioate (PS) bonds.

[1249] In some embodiments, the modification to the 5′ terminus and/or 3′ terminus comprises a 2′-O-methyl (2′-O-Me) or 2′-O-(2-methoxyethyl) (2′-O-moe) modification. In some embodiments, the modification comprises a 2′-fluoro (2′-F) modification to a nucleotide. In some embodiments, the modification comprises a phosphorothioate (PS) linkage between nucleotides. In some embodiments, the modification comprises an inverted abasic nucleotide. In some embodiments, the modification comprises a protective end modification. In some embodiments, the modification comprises a more than one modification selected from protective end modification, 2′-O-Me, 2′-O-moe, 2′-fluoro (2′-F), a phosphorothioate (PS) linkage between nucleotides, and an inverted abasic nucleotide. In some embodiments, an equivalent modification is encompassed.

[1250] In some embodiments, the gRNA comprises one or more phosphorothioate (PS) linkages between the first one, two, three, four, five, six, or seven nucleotides at the 5′ terminus. In some embodiments, the gRNA comprises one or more PS linkages between the last one, two, three, four, five, six, or seven nucleotides at the 3′ terminus. In some embodiments, the gRNA comprises one or more PS linkages between both the last one, two, three, four, five, six, or seven nucleotides at the 3′ terminus and the first one, two, three, four, five, six, or seven nucleotides from the 5′ end of the 5′ terminus. In some embodiments, in addition to PS linkages, the 5′ and 3′ terminal nucleotides may comprise 2′-O-Me, 2′-O-moe, or 2′-F modified nucleotides.

[1251] In some embodiments, the gRNA comprises a 5′ end modification, e.g., wherein the first nucleotide of the guide region is modified. In some embodiments, the gRNA comprises a 5′ end modification, wherein the first nucleotide of the guide region comprises a 5′ protective end modification.

[1252] In some embodiments, the 5′ end modification comprises a modified nucleotide selected from 2′-O-methyl (2′-O-Me) modified nucleotide, 2′-O-(2-methoxyethyl) (2′-O-moe) modified nucleotide, a 2′-fluoro (2′-F) modified nucleotide, a phosphorothioate (PS) linkage between nucleotides, an inverted abasic modified nucleotide, or combinations thereof.

[1253] In some embodiments, the 5′ end modification comprises or further comprises a 2′-O-methyl (2′-O-Me) modified nucleotide.

[1254] In some embodiments, the 5′ end modification comprises or further comprises a 2′-fluoro (2′-F) modified nucleotide.

[1255] In some embodiments, the 5′ end modification comprises or further comprises a phosphorothioate (PS) linkage between nucleotides.

[1256] In some embodiments, the 5′ end modification comprises or further comprises an inverted abasic modified nucleotide.

[1257] In some embodiments, the 5′ end modification comprises or further comprises a modification of any one or more of nucleotides 1-7 of the guide region of a gRNA. In some embodiments, the 5′ end modification comprises or further comprises one modified nucleotide. In some embodiments, the 5′ end modification comprises or further comprises two modified nucleotides. In some embodiments, the 5′ end modification comprises or further comprises three modified nucleotides. In some embodiments, the 5′ end modification comprises or further comprises four modified nucleotides. In some embodiments, the 5′ end modification comprises or further comprises five modified nucleotides. In some embodiments, the 5′ end modification comprises or further comprises six modified nucleotides. In some embodiments, the 5′ end modification comprises or further comprises seven modified nucleotides.

[1258] In some embodiments, the 5′ end modification comprises or further comprises a modification of between 1 and 7, between 1 and 5, between 1 and 4, between 1 and 3, or between 1 and 2 nucleotides.

[1259] In some embodiments, the 5′ end modification comprises or further comprises modifications of 1, 2, 3, 4, 5, 6, or 7 nucleotides from the 5′ end. In some embodiments, the 5′ end modification comprises or further comprises modifications of about 1-3, 1-4, 1-5, 1-6, or 1-7 nucleotides from the 5′ end.

[1260] In some embodiments, the 5′ end modification comprises or further comprises modifications at the first nucleotide at the 5′ end of the gRNA. In some embodiments, the 5′ end modification comprises or further comprises modifications at the first and second nucleotide from the 5′ end of the gRNA. In some embodiments, the 5′ end modification comprises or further comprises modifications at the first, second, and third nucleotide from the 5′ end of the gRNA. In some embodiments, the 5′ end modification comprises or further comprises modifications at the first, second, third, and fourth nucleotide from the 5′ end of the gRNA. In some embodiments, the 5′ end modification comprises or further comprises modifications at the first, second, third, fourth, and fifth nucleotide from the 5′ end of the gRNA. In some embodiments, the 5′ end modification comprises or further comprises modifications at the first, second, third, fourth, fifth, and sixth nucleotide from the 5′ end of the gRNA. In some embodiments, the 5′ end modification comprises or further comprises modifications at the first, second, third, fourth, fifth, sixth, and seventh nucleotide from the 5′ end of the gRNA.

[1261] In some embodiments, the 5′ end modification comprises or further comprises a phosphorothioate (PS) linkage between nucleotides, and/or a 2′-O-Me modified nucleotide, and/or a 2′-O-moe modified nucleotide, and/or a 2′-F modified nucleotide, and/or an inverted abasic modified nucleotide, and/or combinations thereof.

[1262] In some embodiments, the 5′ end modification comprises or further comprises 1, 2, 3, 4, 5, 6, and/or 7 PS linkages between nucleotides. In some embodiments, the 5′ end modification comprises or further comprises about 1-2, 1-3, 1-4, 1-5, 1-6, or 1-7 PS linkages between nucleotides.

[1263] In some embodiments, the 5′ end modification comprises or further comprises at least one PS linkage, wherein if there is one PS linkage, the linkage is between nucleotides 1 and 2 of the guide region.

[1264] In some embodiments, the 5′ end modification comprises or further comprises at least two PS linkages, and the linkages are between nucleotides 1 and 2, and 2 and 3 of the guide region.

[1265] In some embodiments, the 5′ end modification comprises or further comprises PS linkages between any one or more of nucleotides 1 and 2, 2 and 3, and 3 and 4 of the guide region.

[1266] In some embodiments, the 5′ end modification comprises or further comprises PS linkages between any one or more of nucleotides 1 and 2, 2 and 3, 3 and 4, and 4 and 5 of the guide region.

[1267] In some embodiments, the 5′ end modification comprises or further comprises PS linkages between any one or more of nucleotides 1 and 2, 2 and 3, 3 and 4, 4 and 5, and 5 and 6 of the guide region.

[1268] In some embodiments, the 5′ end modification comprises or further comprises PS linkages between any one or more of nucleotides 1 and 2, 2 and 3, 3 and 4, 4 and 5, 5 and 6, and 7 and 8 of the guide region.

[1269] In some embodiments, the 5′ end modification comprises or further comprises a modification of one or more of nucleotides 1-7 of the guide region, wherein the modification is a PS linkage, inverted abasic nucleotide, 2′-O-Me, 2′-O-moe, 2′-F, and/or combinations thereof.

[1270] In some embodiments, the 5′ end modification comprises or further comprises a modification to the first nucleotide of the guide region with 2′-O-Me, 2′-O-moe, 2′-F, or combinations thereof, and an optional PS linkage to the next nucleotide;

[1271] In some embodiments, the 5′ end modification comprises or further comprises a modification to the first and/or second nucleotide of the guide region with 2′-O-Me, 2′-O-moe, 2′-F, or combinations thereof, and optionally one or more PS linkages between the first and second nucleotide and/or between the second and third nucleotide.

[1272] In some embodiments, the 5′ end modification comprises or further comprises a modification to the first, second, and/or third nucleotides of the variable region with 2′-O-Me, 2′-O-moe, 2′-F, or combinations thereof, and optionally one or more PS linkages between the first and second nucleotide, between the second and third nucleotide, and/or between the third and the fourth nucleotide.

[1273] In some embodiments, the 5′ end modification comprises or further comprises a modification to the first, second, third, and/or fourth nucleotides of the variable region with 2′-O-Me, 2′-O-moe, 2′-F, or combinations thereof, and optionally one or more PS linkages between the first and second nucleotide, between the second and third nucleotide, between the third and the fourth nucleotide, and/or between the fourth and the fifth nucleotide.

[1274] In some embodiments, the 5′ end modification comprises or further comprises a modification to the first, second, third, fourth, and/or fifth nucleotides of the variable region with 2′-O-Me, 2′-O-moe, 2′-F, or combinations thereof, and optionally one or more PS linkages between the first and second nucleotide, between the second and third nucleotide, between the third and the fourth nucleotide, between the fourth and the fifth nucleotide, and/or between the fifth and the sixth nucleotide.

[1275] In some embodiments, a gRNA is provided comprising a 5′ end modification, wherein the 5′ end modification comprises a 5′ end modification as shown in any one of SEQ ID NOs: 101-190 or 795-798.

[1276] In some embodiments, the sgRNA comprises a 5′ end modification comprising a 5′ protective end modification. In some embodiments, a gRNA is provided comprising a 5′ end modification, wherein the 5′ end modification comprises 2′-OMe modified nucleotides at nucleotides 1, 2, and 3 of the guide region.

[1277] In some embodiments, a gRNA is provided comprising a 5′ end modification, wherein the 5′ end modification comprises 2′-OMe modified nucleotides at nucleotides 1, 2, and 3 of the guide region and PS linkages between nucleotides 1 and 2, 2 and 3, and 3 and 4 of the guide region.

[1278] In some embodiments, a gRNA is provided comprising a 5′ end modification, wherein the 5′ end modification comprises 2′-OMe modified nucleotides at nucleotides 1, 2, 3, 4, and 5 of the guide region.

[1279] In some embodiments, a gRNA is provided comprising a 5′ end modification, wherein the 5′ end modification comprises 2′-OMe modified nucleotides at nucleotides 1, 2, 3, 4, and 5 of the guide region and PS linkages between nucleotides 1 and 2, 2 and 3, 3 and 4, 4 and 5, and 5 and 6 of the guide region.

[1280] In some embodiments, a gRNA is provided comprising a 5′ end modification, wherein the 5′ end modification comprises 2′O-moe modified nucleotides at nucleotides 1, 2, and 3 of the guide region.

[1281] In some embodiments, a gRNA is provided comprising a 5′ end modification, wherein the 5′ end modification comprises 2′O-moe modified nucleotides at nucleotides 1, 2, and 3 of the guide region and PS linkages between nucleotides 1 and 2, 2 and 3, and 3 and 4 of the guide region.

[1282] In some embodiments, a gRNA is provided comprising a 5′ end modification, wherein the 5′ end modification comprises an inverted abasic modified nucleotide at nucleotide 1 of the guide region.

[1283] In some embodiments, a gRNA is provided comprising a 5′ end modification, wherein the 5′ end modification comprises an inverted abasic modified nucleotide at nucleotide 1 of the guide region and 2′-OMe modified nucleotides at nucleotides 1, 2, and 3 of the guide region.

[1284] In some embodiments, a gRNA is provided comprising a 5′ end modification, wherein the 5′ end modification comprises an inverted abasic modified nucleotide at nucleotide 1 of the guide region, 2′-OMe modified nucleotides at nucleotides 1, 2, and 3 of the guide region, and PS linkages between nucleotides 1 and 2, 2 and 3, 3 and 4, 4 and 5, and 5 and 6 of the guide region.

[1285] In some embodiments, a gRNA is provided comprising a 5′ end modification and a 3′ end modification. In some embodiments, the gRNA comprises modified nucleotides at the 5′ and 3′ terminus, and modified nucleotides in one or more other regions described in Table 3.

[1286] In some embodiments, the sgRNA comprises modified nucleotides that are not at the 5′ or 3′ ends. Exemplary patterns of modifications are described below and in Table 1.

[1287] Upper Stem Modifications

[1288] In some embodiments, a gRNA is provided comprising an upper stem modification, wherein the upper stem modification comprises a modification to any one or more of US1-US12 in the upper stem region.

[1289] In some embodiments, a gRNA is provided comprising an upper stem modification, wherein the upper stem modification comprises a modification of at least 1, 2, 3, 4, 5, 6, 7, 8, 9, 10, 11, or all 12 nucleotides in the upper stem region.

[1290] In some embodiments, a gRNA is provided comprising an upper stem modification, wherein the upper stem modification comprises a modification of about 1-2, 1-3, 1-4, 1-5, 1-6, 1-7, 1-8, 1-9, 1-10, or 1-12 nucleotides in the upper stem region.

[1291] In some embodiments, a gRNA is provided comprising an upper stem modification, wherein the upper stem modification comprises 1, 2, 3, 4, or 5 YA modifications in a YA site. In some embodiments, an sgRNA is provided comprising an upper stem modification, wherein the upper stem modification comprises at least 1, 2, 3, 4, or 5 YA modifications. In some embodiments, an sgRNA is provided comprising an upper stem modification, wherein the upper stem modification comprises one YA modification. In some embodiments, an sgRNA is provided comprising an upper stem modification, wherein the upper stem modification comprises 2 YA modifications. In some embodiments, the upper stem modification comprises 3 YA modifications. In some embodiments, one or more YA modifications are in a YA site. In some embodiments, one or more YA modifications are distal to a YA site.

[1292] In some embodiments, a gRNA is provided comprising an upper stem modification, wherein the upper stem modification comprises a 2′-OMe modified nucleotide. In some embodiments, a gRNA is provided comprising an upper stem modification, wherein the upper stem modification comprises a 2′-O-moe modified nucleotide. In some embodiments, a gRNA is provided comprising an upper stem modification, wherein the upper stem modification comprises a 2′-F modified nucleotide.

[1293] In some embodiments, a gRNA is provided comprising an upper stem modification, wherein the upper stem modification comprises a 2′-OMe modified nucleotide, a 2′-O-moe modified nucleotide, a 2′-F modified nucleotide, and/or combinations thereof.

[1294] In some embodiments, the sgRNA comprises an upper stem modification as shown in any one of the sequences in Table 1. In some embodiments, such an upper stem modification is combined with a 5′ protective end modification, e.g. as shown for the corresponding sequence in Table 1. In some embodiments, such an upper stem modification is combined with a 3′ protective end modification, e.g. as shown for the corresponding sequence in Table 1. In some embodiments, such an upper stem modification is combined with 5′ and 3′ end modifications as shown for the corresponding sequence in Table 1.

[1295] In some embodiments, the gRNA comprises a 5′ end modification and an upper stem modification. In some embodiments, the gRNA comprises a 3′ end modification and an upper stem modification. In some embodiments, the gRNA comprises a 5′ end modification, a 3′ end modification and an upper stem modification.

[1296] Hairpin Modifications

[1297] In some embodiments, the gRNA comprises a modification in the hairpin region. In some embodiments, the hairpin region modification comprises at least one modified nucleotide selected from a 2′-O-methyl (2′-OMe) modified nucleotide, a 2′-fluoro (2′-F) modified nucleotide, and/or combinations thereof.

[1298] In some embodiments, the hairpin region modification is in the hairpin 1 region. In some embodiments, the hairpin region modification is in the hairpin 2 region. In some embodiments, modifications are within the hairpin 1 and hairpin 2 regions, optionally wherein the “n” between hairpin 1 and 2 is also modified.

[1299] In some embodiments, a gRNA is provided comprising a hairpin modification, wherein the hairpin modification comprises 1, 2, or 3 YA modifications in a YA site. In some embodiments, a gRNA is provided comprising a hairpin modification, wherein the hairpin modification comprises at least 1, 2, 3, 4, 5, or 6 YA modifications. In some embodiments, a gRNA is provided comprising a hairpin modification, wherein the hairpin modification comprises one YA modification. In some embodiments, a gRNA is provided comprising a hairpin modification, wherein hairpin modification comprises 2 YA modifications. In some embodiments, the hairpin modification comprises 3 YA modifications. In some embodiments, one or more YA modifications are in a YA site. In some embodiments, one or more YA modifications are distal to a YA site.

[1300] In some embodiments, the hairpin modification comprises or further comprises a 2′-O-methyl (2′-OMe) modified nucleotide.

[1301] In some embodiments, the hairpin modification comprises or further comprises a 2′-fluoro (2′-F) modified nucleotide.

[1302] In some embodiments, the hairpin region modification comprises at least one modified nucleotide selected from a 2′H modified nucleotide (DNA), PS modified nucleotide, a YA modification, a 2′-O-methyl (2′-O-Me) modified nucleotide, a 2′-fluoro (2′-F) modified nucleotide, and/or combinations thereof.

[1303] In some embodiments, the gRNA comprises a 3′ end modification, and a modification in the hairpin region.

[1304] In some embodiments, the gRNA comprises a 5′ end modification, and a modification in the hairpin region.

[1305] In some embodiments, the gRNA comprises an upper stem modification, and a modification in the hairpin region.

[1306] In some embodiments, the gRNA comprises a hairpin modification as shown in any one of the sequences in Table 1A. In some embodiments, such a hairpin modification is combined with a 5′ end modification as shown for the corresponding sequence in Table 1A. In some embodiments, such a hairpin modification is combined with a 3′ end modification as shown for the corresponding sequence in Table 1A. In some embodiments, such a hairpin modification is combined with 5′ and 3′ end modifications as shown for the corresponding sequence in Table 1A.

[1307] In some embodiments, the gRNA comprises a 3′ end modification, a modification in the hairpin region, an upper stem modification, and a 5′ end modification.

[1308] Exemplary Modified gRNAs

[1309] In some embodiments, the gRNAs described herein comprise or consist of any of the sequences shown in Table 1A. Further, gRNAs are encompassed that comprise the modifications of any of the sequences shown in Table 1A, and identified therein by SEQ ID No. That is, the nucleotides may be the same or different, but the modification pattern shown may be the same or similar to a modification pattern of a guide sequence of Table 1A. A modification pattern includes the relative position and identity of modifications of the gRNA (e.g. 5′ terminus region, lower stem region, bulge region, upper stem region, nexus region, hairpin 1 region, hairpin 2 region, 3′ tail region).

[1310] In some embodiments, the modification pattern contains at least 50%, 55%, 60%, 70%, 75%, 80%, 85%, 90%, 95%, 96%, 97%, 98%, and 99% of the modifications of any one of the sequences shown in the sequence column of Table 1A, or over one or more regions of the sequence. In some embodiments, the modification pattern is at least 50%, 55%, 60%, 70%, 75%, 80%, 85%, 90%, 95%, 96%, 97%, 98%, and 99% identical to the modification pattern of any one of the sequences shown in the sequence column of Table 1A. In some embodiments, the modification pattern is at least 50%, 55%, 60%, 70%, 75%, 80%, 85%, 90%, 95%, 96%, 97%, 98%, and 99% identical over one or more (e.g., 1, 2, 3, 4, 5, 6, 7, or 8) regions of the sequence shown in Table 1A, e.g., a 5′ terminus region, lower stem region, bulge region, upper stem region, nexus region, hairpin 1 region, hairpin 2 region, and/or 3′ terminus region.

[1311] For example, in some embodiments, a gRNA is encompassed wherein the modification pattern is least 50%, 55%, 60%, 70%, 75%, 80%, 85%, 90%, 95%, 96%, 97%, 98%, and 99% identical to the modification pattern of a sequence over the 5′ terminus region. In some embodiments, a gRNA is encompassed wherein the modification pattern is least 50%, 55%, 60%, 70%, 75%, 80%, 85%, 90%, 95%, 96%, 97%, 98%, and 99% identical over the lower stem. In some embodiments, a gRNA is encompassed wherein the modification pattern is least 50%, 55%, 60%, 70%, 75%, 80%, 85%, 90%, 95%, 96%, 97%, 98%, and 99% identical over the bulge. In some embodiments, a gRNA is encompassed wherein the modification pattern is least 50%, 55%, 60%, 70%, 75%, 80%, 85%, 90%, 95%, 96%, 97%, 98%, and 99% identical over the upper stem. In some embodiments, a gRNA is encompassed wherein the modification pattern is least 50%, 55%, 60%, 70%, 75%, 80%, 85%, 90%, 95%, 96%, 97%, 98%, and 99% identical over the nexus. In some embodiments, a gRNA is encompassed wherein the modification pattern is least 50%, 55%, 60%, 70%, 75%, 80%, 85%, 90%, 95%, 96%, 97%, 98%, and 99% identical over the hairpin 1. In some embodiments, a gRNA is encompassed wherein the modification pattern is least 50%, 55%, 60%, 70%, 75%, 80%, 85%, 90%, 95%, 96%, 97%, 98%, and 99% identical over the hairpin 2. In some embodiments, a gRNA is encompassed wherein the modification pattern is least 50%, 55%, 60%, 70%, 75%, 80%, 85%, 90%, 95%, 96%, 97%, 98%, and 99% identical over the 3′ terminus. In some embodiments, the modification pattern differs from the modification pattern of a sequence of Table 1A, or a region (e.g. 5′ terminus, lower stem, bulge, upper stem, nexus, hairpin 1, hairpin 2, 3′ terminus) of such a sequence, at 0, 1, 2, 3, 4, 5, or 6 nucleotides. In some embodiments, the gRNA comprises modifications that differ from the modifications of a sequence of Table 1A, at 0, 1, 2, 3, 4, 5, or 6 nucleotides. In some embodiments, the gRNA comprises modifications that differ from modifications of a region (e.g. 5′ terminus, lower stem, bulge, upper stem, nexus, hairpin 1, hairpin 2, 3′ terminus) of a sequence of Table 1A, at 0, 1, 2, 3, 4, 5, or 6 nucleotides.

[1312] In some embodiments, the gRNA comprises a 2′-O-methyl (2′-O-Me) modified nucleotide. In some embodiments, the gRNA comprises a 2′-O-(2-methoxyethyl) (2′-O-moe) modified nucleotide. In some embodiments, the gRNA comprises a 2′-fluoro (2′-F) modified nucleotide. In some embodiments, the gRNA comprises a phosphorothioate (PS) bond between nucleotides. In some embodiments, the sgRNA comprises a YA modification.

[1313] In some embodiments, the gRNA comprises a 5′ end modification, a 3′ end modification, or 5′ and 3′ end modification, such as a protective end modification. In some embodiments, the 5′ end modification comprises a phosphorothioate (PS) bond between nucleotides. In some embodiments, the 5′ end modification comprises a 2′-O-methyl (2′-O-Me), 2′-O-(2-methoxyethyl) (2′-O-moe), and/or 2′-fluoro (2′-F) modified nucleotide. In some embodiments, the 5′ end modification comprises at least one phosphorothioate (PS) bond and one or more of a 2′-O-methyl (2′-O-Me), 2′-O-(2-methoxyethyl) (2′-O-moe), and/or 2′-fluoro (2′-F) modified nucleotide. The end modification may comprise a phosphorothioate (PS), 2′-O-methyl (2′-O-Me), 2′-O-(2-methoxyethyl) (2′-O-moe), and/or 2′-fluoro (2′-F) modification. Equivalent end modifications are also encompassed by embodiments described herein. In some embodiments, the gRNA comprises an end modification in combination with a modification of one or more regions of the gRNA.

[1314] Modified gRNAs comprising combinations of 5′ end modifications, 3′ end modifications, upper stem modifications, hairpin modifications, and 3′ terminus modifications, as described above, are encompassed. Exemplary modified gRNAs are described below.

[1315] In some embodiments, a gRNA is provided comprising or consisting of any one of the sequences described in SEQ ID NOs: 1-98, 201-294, 401-494, 601-698, 801-875. In some embodiments, a gRNA is provided compromising or consisting of any one of the sequences described in SEQ ID NOs: 101-198, 301-394, 501-594, 701-798, or 901-975 including the modifications shown in Table 1A.

[1316] In some embodiments, a gRNA is provided comprising any one of the sequences of SEQ ID NOs: 201-294, wherein the gRNA further comprises a guide region that is complementary to a target sequence, and directs a Cas9 to its target for cleavage. In some embodiments, a gRNA is provided comprising any one of the modified sequences of SEQ ID NOs: 301-394, wherein the gRNA further comprises a guide region that is complementary to a target sequence, and directs a Cas9 to its target for cleavage. In some instances, the invention comprises gRNA is provided comprising nucleic acids having at least 99, 98, 97, 96, 95, 94, 93, 92, 91, 90, 85, 80, 75, or 70% identity to the nucleic acids of any one of SEQ ID NOs: 1-98, 201-294, 401-494, 601-698, or 801-875. In some embodiments, a gRNA is provided comprising nucleic acids having at least 99, 98, 97, 96, 95, 94, 93, 92, 91, 90, 85, 80, 75, or 70% identity to the nucleic acids of any one of SEQ ID NOs: 101-198, 301-394, 501-594, 701-798, or 901-975, wherein the modification pattern is identical to the modification pattern shown in the reference sequence identifier in Table 1A. Any of the foregoing the gRNAs may further comprises three phosphorothioate (PS) bonds linking the first four nucleotides at the 5′ terminus and three PS bonds linking the last four nucleotides at the 3′ terminus.

[1317] In some embodiments, the gRNA comprises modifications at 1, 2, 3, or 4 of the first 4 nucleotides at its 5′ end. In some embodiments, the first three or four nucleotides at the 5′ terminus, and the last three or four nucleotides at the 3′ terminus are modified. In some embodiments, the first four nucleotides at the 5′ end, and the last four nucleotides at the 3′ terminus are linked with phosphorothioate (PS) bonds. In some embodiments, the modification comprises 2′-O-Me. In some embodiments, the modification comprises 2′-F. In some embodiments, the modification comprises 2′-O-moe.

[1318] In some embodiments, the gRNA comprises, if the nucleotide mentioned is present in the gRNA, modifications at 1, 2, 3, or 4 of the first 4 nucleotides at the 5′ end. In some embodiments, the gRNA comprises modifications at 1, 2, 3, or 4 of the last 4 nucleotides at the 3′ end (3′ tail or conserved portion of an sgRNA). In some embodiments, the first four nucleotides at the 5′ terminus and the last four nucleotides at the 3′ terminus are linked with a PS bond, and the first three nucleotides at the 5′ terminus and the last three nucleotides at the 3′ terminus comprise 2′-O-Me or 2′-O-moe modifications.

[1319] In some embodiments, the first four nucleotides at the 5′ terminus and the last four nucleotides at the 3′ terminus are linked with a PS bond, and the first three nucleotides at the 5′ terminus and the last three nucleotides at the 3′ terminus comprise 2′-F modifications.

[1320] In some embodiments, a gRNA is provided, if the nucleotide mentioned is present in the gRNA, wherein LS1, LS6, LS7, LS8, LS11, and LS12 are modified with 2′-O-Me. In some embodiments, each of the nucleotides in the bulge region of the gRNA are modified with 2′-O-Me. In some embodiments, each of the nucleotides in the upper stem region of the gRNA are modified with 2′-O-Me. In some embodiments, N16, N17, and N18 in the nexus region of the gRNA are modified with 2′-O-Me. In some embodiments, each of the nucleotides remaining in the hairpin 1 region of the gRNA are modified with 2′-O-Me. In some embodiments, each of the nucleotides remaining in the hairpin 2 region of the gRNA are modified with 2′-O-Me.

[1321] In some embodiments, a gRNA comprising a 5′ end modification and one or more modifications in one or more of: the upper stem region; the hairpin 1 region; and the hairpin 2 region is provided, wherein the 5′ end modification comprises at least two phosphorothioate linkages within the first seven nucleotides of the 5′ terminus.

[1322] In some embodiments, a gRNA comprising a 5′ end modification and one or more modifications in one or more of: the upper stem region; the hairpin 1 region; and the hairpin 2 region is provided, wherein the 5′ end modification comprises one or more phosphorothioate linkages at the 5′ end. In some embodiments, one or more phorphorothioate bonds link the 5′ terminal nucleotides.

[1323] In some embodiments, a gRNA comprising a 5′ end modification and one or more modifications in one or more of: the upper stem region; the hairpin 1 region; and the hairpin 2 region is provided, wherein the 5′ end modification comprises one or more phosphorothioate linkages within the first seven nucleotides of the 5′ terminus.

[1324] In some embodiments, the invention comprises a gRNA comprising any one of the modified sequences of SEQ ID NOs: 201-294 or 301-394, wherein the gRNA further comprises a 5′ guide region that is at least partially complementary to a target sequence, and optionally directs a Cas9 to its target for cleavage.

[1325] In some embodiments, the invention comprises a gRNA comprising nucleotides having at least 99, 98, 97, 96, 95, 94, 93, 92, 91, 90, 85, 80, 75, or 70% identity to the nucleotides of any one of SEQ ID NOs: 1-98, 201-294, 401-494, 601-698, or 801-875 wherein the modification pattern is identical to the modification pattern shown in the reference sequence identifier. That is, the nucleotides A, U, C, and G may differ by 99, 98, 97, 96, 95, 94, 93, 92, 91, 90, 85, 80, 75, or 70% compared to what is shown in in the sequences, but the modification remains unchanged.

[1326] In some embodiments, a gRNA is provided comprising, if the nucleotide mentioned is present in the guide, 2′-O-Me modified nucleotides at: the first three nucleotides in the 5′ terminus; LS1, LS6, LS7, LS8, LS11, and LS12 in the lower stem; B1 and B2 in the bulge region; each of the nucleotides in the upper stem region; N16, N17, and N18 in the nexus region; each of the nucleotides in the hairpin 1 region; one nucleotide between hairpin 1 and hairpin 2; each of the nucleotides in the hairpin 2 region; and the last four nucleotides at the 3′ terminus. In some embodiments, the sgRNA further comprises three PS bonds between the first four nucleotides at the 5′ terminus and three PS bonds between the last four nucleotides at the 3′ terminus.

[1327] In some embodiments, a gRNA is provided comprising, if the nucleotide mentioned is present in the guide, 2′-O-Me modified nucleotides at: the first three nucleotides in the 5′ terminus; LS1, LS6, LS7, LS8, LS11, and LS12 in the lower stem; B1-B6 in the bulge region; each of the nucleotides in the upper stem region; N16, N17, and N18 in the nexus region; each of the nucleotides in the hairpin 1 region; one nucleotide between hairpin 1 and hairpin 2; each of the nucleotides in the hairpin 2 region; and the last four nucleotides at the 3′ terminus. In some embodiments, the sgRNA further comprises three PS bonds between the first four nucleotides at the 5′ terminus and three PS bonds between the last four nucleotides at the 3′ terminus.

[1328] In some embodiments, a gRNA is provided comprising 2′-F modified nucleotides at: LS9 and LS10 in the lower stem; 15-N18 in the nexus region; H2-9-HS-15 in the hairpin 2 region; and the second to last, third to last, and fourth to last nucleotide in the 3′ terminus region.

[1329] In some embodiments, a gRNA is provided comprising 2′-F modified nucleotides at: each nucleotide in the lower stem; 15-N18 in the nexus region; H2-9-HS-15 in the hairpin 2 region; and the second to last, third to last, and fourth to last nucleotide in the 3′ terminus region.

[1330] In some embodiments, a gRNA is provided comprising, if the nucleotide mentioned is present in the guide, 2′-OMe modified nucleotides at LS8, LS10, LS12, H1-2, H1-4, H1-6, H1-8, H1-10, H1-12, H2-1, H2-3, H2-5, H2-7, H2-9, H2-11, H2-13, H2- 15, and the last and third to last nucleotides at the 3′ terminus; and 2′-F modifications at LS7, LS9, LS11; H1-1, H1-3, H1-5, H1-7, H1-9, H1-11, H1-13, H2-2, H2-4, H2-6, H2-8, H2-10, H2-12, H2-14, and the second to last and fourth to last nucleotide at the 3′ terminus.

[1331] Any of the foregoing modification patterns can be combined with a modification pattern set forth in the embodiments described above, e.g., in the summary section or Table 1, to the extent that they are non-overlapping. In the event that combining a foregoing modification pattern with a modification pattern set forth in the summary section or Table 1A would result in incompatible modifications (e.g., the same position would be both 2′-OMe and 2′-fluoro), the modification set forth in the summary section or Table 1A controls.

sgRNAs; Domains/Regions Thereof.

[1332] In some embodiments, a gRNA provided herein is an sgRNA. Briner A E et al., Molecular Cell 56:333-339 (2014) describes functional domains of sgRNAs, referred to herein as “domains”, including the “spacer” domain responsible for targeting, the “lower stem”, the “bulge”, “upper stem” (which may include a tetraloop), the “nexus”, and the “hairpin 1” and “hairpin 2” domains. See Briner et al. at page 334, FIG. 1A. As described in detail elsewhere herein, one or more domains (e.g., hairpin 1 and/or the upper stem) may be shortened in an sgRNA described herein.

[1333] Table 3 provides a schematic of the domains of an sgRNA as used herein. In Table 3, the “n” between regions represents a variable number of nucleotides, for example, from 0 to 1, 2, 3, 4, 5, 6, 7, 8, 9, 10, 11, 12, 13, 14, 15, 16, 17, 18, 19, 20, or more. In some embodiments, n equals 0. In some embodiments, n equals 1.

[1334] 5′ Terminus Region

[1335] In some embodiments, the sgRNA comprises nucleotides at the 5′ terminus as shown in Table 3. In some embodiments, the 5′ terminus of the sgRNA comprises a spacer or guide region that functions to direct a Cas protein, e.g., a Cas9 protein, to a target nucleotide sequence. In some embodiments, the 5′ terminus does not comprise a guide region. In some embodiments, the 5′ terminus comprises a spacer and additional nucleotides that do not function to direct a Cas protein to a target nucleotide region.

[1336] Lower Stem

[1337] In some embodiments, the sgRNA comprises a lower stem (LS) region that when viewed linearly, is separated by a bulge and upper stem regions. See Table 3.

[1338] In some embodiments, the lower stem regions comprise 1-12 nucleotides, e.g. in one embodiment the lower stem regions comprise LS1-LS12. In some embodiments, the lower stem region comprises fewer nucleotides than shown in Table 3. In some embodiments, the lower stem region comprises more nucleotides than shown in Table 3. When the lower stem region comprises fewer or more nucleotides than shown in the schematic of Table 3, the modification pattern, as will be apparent to the skilled artisan, should be maintained.

[1339] In some embodiments, the lower stem region has nucleotides that are complementary in nucleic acid sequence when read in opposite directions. In some embodiments, the complementarity in nucleic acid sequence of lower stem leads to a secondary structure of a stem in the sgRNA (e.g., the regions may base pair with one another). In some embodiments, the lower stem regions may not be perfectly complimentary to each other when read in opposite directions.

[1340] Bulge

[1341] In some embodiments, the sgRNA comprises a bulge region comprising six nucleotides, B1-B6. When viewed linearly, the bulge region is separated into two regions. See Table 3. In some embodiments, the bulge region comprises six nucleotides, wherein the first two nucleotides are followed by an upper stem region, followed by the last four nucleotides of the bulge. In some embodiments, the bulge region comprises fewer nucleotides than shown in Table 3. In some embodiments, the bulge region comprises more nucleotides than shown in Table 3. When the bulge region comprises fewer or more nucleotides than shown in the schematic of Table 3, the modification pattern, as will be apparent to the skilled artisan, should be maintained.

[1342] In some embodiments, the presence of a bulge results in a directional kink between the upper and lower stem modules in an sgRNA.

[1343] Upper Stem

[1344] In some embodiments, the upper stem region is a shortened upper stem region, such as any of the shortened upper stem regions described elsewhere herein.

[1345] In other embodiments, the sgRNA comprises an upper stem region comprising 12 nucleotides. In some embodiments, the upper stem region comprises a loop sequence. In some instances, the loop is a tetraloop (loop consisting of four nucleotides). In some embodiments, the upper stem region comprises more nucleotides than shown in Table 3.

[1346] When the upper stem region comprises fewer or more nucleotides than shown in the schematic of Table 3, the modification pattern, as will be apparent to the skilled artisan, should be maintained.

[1347] In some embodiments, the upper stem region has nucleotides that are complementary in nucleic acid sequence when read in opposite directions. In some embodiments, the complementarity in nucleic acid sequence of upper stem leads to a secondary structure of a stem in the sgRNA (e.g., the regions may base pair with one another). In some embodiments, the upper stem regions may not be perfectly complimentary to each other when read in opposite directions.

[1348] Nexus

[1349] In some embodiments, the sgRNA comprises a nexus region that is located between the lower stem region and the hairpin 1 region. In some embodiments, the nexus comprises 18 nucleotides. In some embodiments, the nexus region comprises nucleotides N1 through N18 as shown in Table 3. In some embodiments, the nexus region comprises a substitution (e.g., at position N18) or lacks a nucleotide, such as any of the nexus regions with a substitution or lacking a nucleotide described in detail elsewhere herein.

[1350] In some embodiments, the nexus region comprises fewer nucleotides than shown in Table 3. In some embodiments, the nexus region comprises more nucleotides than shown in Table 3. When the nexus region comprises fewer or more nucleotides than shown in the schematic of Table 3, the modification pattern, as will be apparent to the skilled artisan, should be maintained.

[1351] In some embodiments, the nexus region has nucleotides that are complementary in nucleic acid sequence when read in opposite directions. In some embodiments, the complementarity in nucleic acid sequence leads to a secondary structure of a stem and/or stem loop in the sgRNA (e.g., certain nucleotides in the nexus region may base pair with one another). In some embodiments, the nexus regions may not be perfectly complimentary to each other when read in opposite directions.

[1352] Hairpin

[1353] In some embodiments, the sgRNA comprises one or more hairpin regions. In some embodiments, the hairpin region is downstream of (e.g., 3′ to) the nexus region. In some embodiments, the region of nucleotides immediately downstream of the nexus region is termed “hairpin 1” or “H1”. In some embodiments, the region of nucleotides 3′ to hairpin 1 is termed “hairpin 2” or “H2”. In some embodiments, the hairpin region comprises both hairpin 1 and hairpin 2. In some embodiments, the sgRNA comprises hairpin 1 or hairpin 2.

[1354] In some embodiments, the hairpin 1 region is a shortened hairpin 1 region, such as any of the shortened hairpin 1 regions described elsewhere herein.

[1355] In other embodiments, the hairpin 1 region comprises 12 nucleotides immediately downstream of the nexus region. In some embodiments, the hairpin 1 region comprises nucleotides H1-1 through H1-12 as shown in Table 3.

[1356] In some embodiments, the hairpin 2 region comprises 15 nucleotides downstream of the hairpin 1 region. In some embodiments, the hairpin 2 region comprises nucleotides H2-1 through H2-15 as shown in Table 3.

[1357] In some embodiments, one or more nucleotides is present between the hairpin 1 and the hairpin 2 regions. The one or more nucleotides between the hairpin 1 and hairpin 2 region may be modified or unmodified. In some embodiments, hairpin 1 and hairpin 2 are separated by one nucleotide. In some embodiments, the hairpin regions comprise fewer nucleotides than shown in Table 3. In some embodiments, the hairpin regions comprise more nucleotides than shown in Table 3. When a hairpin region comprises fewer or more nucleotides than shown in the schematic of Table 3, the modification pattern, as will be apparent to the skilled artisan, should be maintained.

[1358] In some embodiments, a hairpin region has nucleotides that are complementary in nucleic acid sequence when read in opposite directions. In some embodiments, the hairpin regions may not be perfectly complimentary to each other when read in opposite directions (e.g., the top or loop of the hairpin comprises unpaired nucleotides).

[1359] In some embodiments, the sgRNA comprises replacement of hairpin 1 with nucleotides “n”, wherein “n” is an integer between 1 and 50, 40, 30, 20, 15, 10, 5, 4, 3, and 2. In some embodiments, the hairpin 1 region of an sgRNA is replaced by 2 nucleotides.

[1360] 3′ Terminus

[1361] The sgRNA has a 3′ end, which is the last nucleotide of the sgRNA. The 3′ terminus region includes the last 1-7 nucleotides from the 3′ end. In some embodiments, the 3′ end is the end of hairpin 2. In some embodiments, the sgRNA comprises nucleotides after the hairpin region(s). In some embodiments, the sgRNA includes a 3′ tail region, in which case the last nucleotide of the 3′ tail is the 3′ terminus. In some embodiments, the 3′ tail comprises 1, 2, 3, 4, 5, 6, 7, 8, 9, 10, 15 or 20 or more nucleotides, e.g. that are not associated with the secondary structure of a hairpin. In some embodiments, the 3′ tail region comprises 1, 2, 3, or 4 nucleotides that are not associated with the secondary structure of a hairpin. In some embodiments, the 3′ tail region comprises 4 nucleotides that are not associated with the secondary structure of a hairpin. In some embodiments, the 3′ tail region comprises 1, 2, or 3 nucleotides that are not associated with the secondary structure of a hairpin.

TABLE 2
(Conserved Portion of a spyCas9 sgRNA; SEQ ID NO: 400)

| 1 | 2 | 3 | 4 | 5 | 6 | 7 | 8 | 9 | 10 | 11 | 12 | 13 | 14 | 15 | 16 | 17 | 18 | 19 | 20 | 21 | 22 | 23 | 24 | 25 | 26 | 27 | 28 | 29 |
|---|---|---|---|---|---|---|---|---|---|---|---|---|---|---|---|---|---|---|---|---|---|---|---|---|---|---|---|---|
| G | U | U | U | U | A | G | A | G | C | u | A | G | A | A | A | U | A | G | C | A | A | G | U | U | A | A | A | A |

| | | | | |
|---|---|---|---|---|
| LS1-LS6 | B1-B2 | US1-US12 | B2-B6 | LS7-LS12 |

| 30 | 31 | 32 | 33 | 34 | 35 | 36 | 37 | 38 | 39 | 40 | 41 | 42 | 43 | 44 | 45 | 46 | 47 | 48 | 49 | 50 | 51 | 52 | 53 | 54 | 55 | 56 | 57 | 58 | 59 |
|---|---|---|---|---|---|---|---|---|---|---|---|---|---|---|---|---|---|---|---|---|---|---|---|---|---|---|---|---|---|
| U | A | A | G | G | C | U | A | G | U | C | C | G | U | U | A | U | C | A | A | C | U | U | G | A | A | A | A | A | G |

| | | |
|---|---|---|
| LS7- | Nexus | H1-1 through H1-12 |
| LS12 | | |

| 60 | 61 | 62 | 63 | 64 | 65 | 66 | 67 | 68 | 69 | 70 | 71 | 72 | 73 | 74 | 75 | 76 |
|---|---|---|---|---|---|---|---|---|---|---|---|---|---|---|---|---|
| U | G | G | C | A | C | C | G | A | G | U | C | G | G | U | G | C |

| | | |
|---|---|---|
| H1-1 | N | H2-1 through H2-15 |
| through | | |
| H1-12 | | |

TABLE 3
(Regions of sgRNA (linear view, 5′ to 3′)

| | LSI-6 | | B1-2 | | US1-12 | | B3-6 | |
|---|---|---|---|---|---|---|---|---|
| 5′ terminus (n) | lower stem | n | bulge | n | upper stem | n | bulge | n |

| LS7-12 | | N1-18 | | H1-1 thru H1-12 | | H2-1 thru H2-15 | |
|---|---|---|---|---|---|---|---|
| lower stem | n | nexus | n | hairpin 1 | n | hairpin 2 | 3′ terminus |

### Compositions and Kits

[1362] Compositions comprising any of the gRNAs (e.g., sgRNAs, dgRNAs, or crRNAs) described herein and a carrier, excipient, diluent, or the like are encompassed. In some instances, the excipient or diluent is inert. In some instances, the excipient or diluent is not inert. In some embodiments, a pharmaceutical formulation is provided comprising any of the gRNAs (e.g., sgRNAs, dgRNAs, or crRNAs) described herein and a pharmaceutically acceptable carrier, excipient, diluent, or the like. In some embodiments, the pharmaceutical formulation further comprises an LNP. In some embodiments, the pharmaceutical formulation further comprises a Cas9 protein or an mRNA encoding a Cas9 protein. In some embodiments, the pharmaceutical formulation comprises any one or more of the gRNAs (e.g., sgRNAs, dgRNAs, or crRNAs), an LNP, and a Cas9 protein or mRNA encoding a Cas9 protein.

[1363] Also provided are kits comprising one or more gRNAs (e.g., sgRNAs, dgRNAs, or crRNAs), compositions, or pharmaceutical formulations described herein. In some embodiments, a kit further comprises one or more of a solvent, solution, buffer, each separate from the composition or pharmaceutical formulation, instructions, or desiccant.

[1364] Compositions Comprising an RNA-Guided DNA Binding Agent or mRNA Encoding RNA-Guided DNA Binding Agent

[1365] In some embodiments, compositions or pharmaceutical formulations are provided comprising at least one gRNA (e.g., sgRNA, dgRNA, or crRNA) described herein and an RNA-guided DNA binding agent or a nucleic acid (e.g., an mRNA) encoding an RNA-guided DNA binding agent. In some embodiments, the RNA-guided DNA binding agent is a Cas protein. In some embodiments, the gRNA together with a Cas protein or nucleic acid (e.g., mRNA) encoding Cas protein is called a Cas RNP. In some embodiments, the RNA-guided DNA binding agent is one that functions with the gRNA to direct a RNA-guided DNA binding agent to a target nucleic acid sequence. In some embodiments, the RNA-guided DNA binding agent is a Cas protein from the Type-II CRISPR/Cas system. In some embodiments, the Cas protein is Cas9. In some embodiments, the Cas9 protein is a wild type Cas9. In some embodiments, the Cas9 protein is derived from the Streptococcus pyogenes Cas9 protein, e.g., a S. pyogenes Cas9 (sypCas9). In some embodiments, compositions are provided comprising at least one gRNA and a nuclease or an mRNA encoding a spyCas9. In some embodiments, the Cas9 protein is not derived from S. pyogenes, but functions in the same way as S. pyogenes Cas9 such that gRNA that is specific to S. pyogenes Cas9 will direct the non-S. pyogenes Cas9 to its target site. In some embodiments, the Cas9 protein is derived from the Staphylococcus aureus Cas9 protein, e.g., a SaCas9. In some embodiments, compositions are provided comprising at least one gRNA and a nuclease or an mRNA encoding a saCas9. In some embodiments, the Cas induces a double strand break in target DNA. Equivalents of spyCas9 and saCas9 protein are encompassed by the embodiments described herein.

[1366] RNA-guided DNA binding agents, including Cas9, encompass modified and variants thereof. Modified versions having one catalytic domain, either RuvC or HNH, that is inactive are termed “nickases.” Nickases cut only one strand on the target DNA, thus creating a single-strand break. A single-strand break may also be known as a “nick.” In some embodiments, the compositions and methods comprise nickases. In some embodiments, the compositions and methods comprise a nickase RNA-guided DNA binding agent, such as a nickase Cas9, that induces a nick rather than a double strand break in the target DNA.

[1367] In some embodiments, the nuclease, e.g. the RNA-guided DNA binding agent, may be modified to contain only one functional nuclease domain. For example, the RNA-guided DNA binding agent may be modified such that one of the nuclease domains is mutated or fully or partially deleted to reduce its nucleic acid cleavage activity. In some embodiments, a nickase Cas is used having a RuvC domain with reduced activity. In some embodiments, a nickase Cas is used having an inactive RuvC domain. In some embodiments, a nickase Cas is used having an HNH domain with reduced activity. In some embodiments, a nickase Cas is used having an inactive HNH domain.

[1368] In some embodiments, a conserved amino acid within an RNA-guided DNA binding agent nuclease domain is substituted to reduce or alter nuclease activity. In some embodiments, a Cas protein may comprise an amino acid substitution in the RuvC or RuvC-like nuclease domain. Exemplary amino acid substitutions in the RuvC or RuvC-like nuclease domain include D10A (based on the S. pyogenes Cas9 protein). In some embodiments, the Cas protein may comprise an amino acid substitution in the HNH or HNH-like nuclease domain. Exemplary amino acid substitutions in the HNH or HNH-like nuclease domain include E762A, H840A, N863A, H983A, and D986A (based on the spyCas9 protein).

[1369] In some embodiments, the RNP complex described herein comprises a nickase or an mRNA encoding a nickase and a pair of gRNAs (one or both of which may be sgRNAs) that are complementary to the sense and antisense strands of the target sequence, respectively. In this embodiment, the gRNAs (e.g., sgRNAs) direct the nickase to a target sequence and introduce a double stranded break (DSB) by generating a nick on opposite strands of the target sequence (i.e., double nicking). In some embodiments, use of double nicking may improve specificity and reduce off-target effects. In some embodiments, a nickase RNA-guided DNA binding agent is used together with two separate gRNAs (e.g., sgRNAs) that are selected to be in close proximity to produce a double nick in the target DNA.

[1370] In some embodiments, chimeric Cas proteins are used, where one domain or region of the protein is replaced by a portion of a different protein. In some embodiments, a Cas nuclease domain may be replaced with a domain from a different nuclease such as Fok1. In some embodiments, a Cas protein may be a modified nuclease.

[1371] In some embodiments, the Cas protein comprises a fusion protein comprising a catalytically inactive Cas nuclease (e.g., Cas9) linked to a heterologous functional domain (see, e.g., WO2014152432). In some embodiments, the catalytically inactive Cas9 is from S. pyogenes. In some embodiments, the catalytically inactive Cas comprises mutations that inactivate the Cas. In some embodiments, the heterologous functional domain is a domain that modifies gene expression, histones, or DNA. In some embodiments, the heterologous functional domain is a transcriptional activation domain or a transcriptional repressor domain. In some embodiments, the nuclease is a catalytically inactive Cas nuclease, such as dCas9.

[1372] In some embodiments, the target sequence may be adjacent to a PAM. In some embodiments, the PAM may be adjacent to or within 1, 2, 3, or 4, nucleotides of the 3′ end of the target sequence. The length and the sequence of the PAM may depend on the Cas protein used. For example, the PAM may be selected from a consensus or a particular PAM sequence for a specific Cas9 protein or Cas9 ortholog, including those disclosed in FIG. 1 of Ran et al., Nature 520:186-191 (2015). In some embodiments, the PAM may comprise 2, 3, 4, 5, 6, 7, 8, 9, or 10 nucleotides in length. Non-limiting exemplary PAM sequences include NGG, NAG, NGA, NGAG, NGCG, NNGRRT, TTN, NGGNG, NG, NAAAAN, NNAAAAW, NNNNACA, GNNNCNNA, and NNNNGATT (wherein N is defined as any nucleotide, and W is defined as either A or T, and R is defined as either A or G). In some embodiments, the PAM sequence may be NGG. In some embodiments, the PAM sequence may be NGGNG. In some embodiments, the PAM sequence may be NNAAAAW.

[1373] In some embodiments, the heterologous functional domain may facilitate transport of the RNA-guided DNA-binding agent into the nucleus of a cell. For example, the heterologous functional domain may be a nuclear localization signal (NLS). In some embodiments, the RNA-guided DNA-binding agent may be fused with 1-10 NLS(s). In some embodiments, the RNA-guided DNA-binding agent may be fused with 1-5 NLS(s). In some embodiments, the RNA-guided DNA-binding agent may be fused with one NLS. Where one NLS is used, the NLS may be fused at the N-terminus or the C-terminus of the RNA-guided DNA-binding agent sequence. It may also be inserted within the RNA-guided DNA binding agent sequence. In other embodiments, the RNA-guided DNA-binding agent may be fused with more than one NLS. In some embodiments, the RNA-guided DNA-binding agent may be fused with 2, 3, 4, or 5 NLSs. In some embodiments, the RNA-guided DNA-binding agent may be fused with two NLSs. In certain circumstances, the two NLSs may be the same (e.g., two SV40 NLSs) or different. In some embodiments, the RNA-guided DNA-binding agent is fused to two NLS sequences (e.g., SV40) at the carboxy terminus. In some embodiments, the RNA-guided DNA-binding agent may be fused with two NLSs, one at the N-terminus and one at the C-terminus. In some embodiments, the RNA-guided DNA-binding agent may be fused with 3 NLSs. In some embodiments, the RNA-guided DNA-binding agent may be fused with no NLS. In some embodiments, the NLS may be a monopartite sequence, such as, e.g., the SV40 NLS, PKKKRKV (SEQ ID NO: 1001) or PKKKRRV (SEQ ID NO: 1002). In some embodiments, the NLS may be a bipartite sequence, such as the NLS of nucleoplasmin, KRPAATKKAGQAKKKK (SEQ ID NO: 1003). In a specific embodiment, a single PKKKRKV (SEQ ID NO: 1001) NLS may be fused at the C-terminus of the RNA-guided DNA-binding agent. One or more linkers are optionally included at the fusion site.

[1374] In some embodiments, an nucleic acid (e.g., mRNA) comprising an ORF encoding an RNA-guided DNA binding agent is used which has one or more of the following features. In some embodiments, the ORF encoding the RNA-guided DNA-binding agent, e.g. a Cas9 nuclease such as an S. pyogenes Cas9, has an adenine content ranging from its minimum adenine content to about 150% of its minimum adenine content. In some embodiments, the adenine content of the ORF is less than or equal to about 145%, 140%, 135%, 130%, 125%, 120%, 115%, 110%, 105%, 104%, 103%, 102%, or 101% of its minimum adenine content. In some embodiments, the ORF has an adenine content equal to its minimum adenine content. In some embodiments, the ORF has an adenine content less than or equal to about 150% of its minimum adenine content. In some embodiments, the ORF has an adenine content less than or equal to about 145% of its minimum adenine content. In some embodiments, the ORF has an adenine content less than or equal to about 140% of its minimum adenine content. In some embodiments, the ORF has an adenine content less than or equal to about 135% of its minimum adenine content. In some embodiments, the ORF has an adenine content less than or equal to about 130% of its minimum adenine content. In some embodiments, the ORF has an adenine content less than or equal to about 125% of its minimum adenine content. In some embodiments, the ORF has an adenine content less than or equal to about 120% of its minimum adenine content. In some embodiments, the ORF has an adenine content less than or equal to about 115% of its minimum adenine content. In some embodiments, the ORF has an adenine content less than or equal to about 110% of its minimum adenine content. In some embodiments, the ORF has an adenine content less than or equal to about 105% of its minimum adenine content. In some embodiments, the ORF has an adenine content less than or equal to about 104% of its minimum adenine content. In some embodiments, the ORF has an adenine content less than or equal to about 103% of its minimum adenine content. In some embodiments, the ORF has an adenine content less than or equal to about 102% of its minimum adenine content. In some embodiments, the ORF has an adenine content less than or equal to about 101% of its minimum adenine content.

[1375] In some embodiments, the ORF has an adenine dinucleotide content ranging from its minimum adenine dinucleotide content to 200% of its minimum adenine dinucleotide content. In some embodiments, the adenine dinucleotide content of the ORF is less than or equal to about 195%, 190%, 185%, 180%, 175%, 170%, 165%, 160%, 155%, 150%, 145%, 140%, 135%, 130%, 125%, 120%, 115%, 110%, 105%, 104%, 103%, 102%, or 101% of its minimum adenine dinucleotide content. In some embodiments, the ORF has an adenine dinucleotide content equal to its minimum adenine dinucleotide content. In some embodiments, the ORF has an adenine dinucleotide content less than or equal to about 200% of its minimum adenine dinucleotide content. In some embodiments, the ORF has an adenine dinucleotide content less than or equal to about 195% of its minimum adenine dinucleotide content. In some embodiments, the ORF has an adenine dinucleotide content less than or equal to about 190% of its minimum adenine dinucleotide content. In some embodiments, the ORF has an adenine dinucleotide content less than or equal to about 185% of its minimum adenine dinucleotide content. In some embodiments, the ORF has an adenine dinucleotide content less than or equal to about 180% of its minimum adenine dinucleotide content. In some embodiments, the ORF has an adenine dinucleotide content less than or equal to about 175% of its minimum adenine dinucleotide content. In some embodiments, the ORF has an adenine dinucleotide content less than or equal to about 170% of its minimum adenine dinucleotide content. In some embodiments, the ORF has an adenine dinucleotide content less than or equal to about 165% of its minimum adenine dinucleotide content. In some embodiments, the ORF has an adenine dinucleotide content less than or equal to about 160% of its minimum adenine dinucleotide content. In some embodiments, the ORF has an adenine dinucleotide content less than or equal to about 155% of its minimum adenine dinucleotide content. In some embodiments, the ORF has an adenine dinucleotide content equal to its minimum adenine dinucleotide content. In some embodiments, the ORF has an adenine dinucleotide content less than or equal to about 150% of its minimum adenine dinucleotide content. In some embodiments, the ORF has an adenine dinucleotide content less than or equal to about 145% of its minimum adenine dinucleotide content. In some embodiments, the ORF has an adenine dinucleotide content less than or equal to about 140% of its minimum adenine dinucleotide content. In some embodiments, the ORF has an adenine dinucleotide content less than or equal to about 135% of its minimum adenine dinucleotide content. In some embodiments, the ORF has an adenine dinucleotide content less than or equal to about 130% of its minimum adenine dinucleotide content. In some embodiments, the ORF has an adenine dinucleotide content less than or equal to about 125% of its minimum adenine dinucleotide content. In some embodiments, the ORF has an adenine dinucleotide content less than or equal to about 120% of its minimum adenine dinucleotide content. In some embodiments, the ORF has an adenine dinucleotide content less than or equal to about 115% of its minimum adenine dinucleotide content. In some embodiments, the ORF has an adenine dinucleotide content less than or equal to about 110% of its minimum adenine dinucleotide content. In some embodiments, the ORF has an adenine dinucleotide content less than or equal to about 105% of its minimum adenine dinucleotide content. In some embodiments, the ORF has an adenine dinucleotide content less than or equal to about 104% of its minimum adenine dinucleotide content. In some embodiments, the ORF has an adenine dinucleotide content less than or equal to about 103% of its minimum adenine dinucleotide content. In some embodiments, the ORF has an adenine dinucleotide content less than or equal to about 102% of its minimum adenine dinucleotide content. In some embodiments, the ORF has an adenine dinucleotide content less than or equal to about 101% of its minimum adenine dinucleotide content.

[1376] In some embodiments, the ORF has an adenine dinucleotide content ranging from its minimum adenine dinucleotide content to the adenine dinucleotide content that is 90% or lower of the maximum adenine dinucleotide content of a reference sequence that encodes the same protein as the mRNA in question. In some embodiments, the adenine dinucleotide content of the ORF is less than or equal to about 85%, 80%, 75%, 70%, 65%, 60%, 55%, 50%, 45%, 40%, 35%, 30%, 25%, 20%, 15%, 10%, or 5% of the maximum adenine dinucleotide content of a reference sequence that encodes the same protein as the mRNA in question.

[1377] In some embodiments, the ORF has an adenine trinucleotide content ranging from 0 adenine trinucleotides to 1, 2, 3, 4, 5, 6, 7, 8, 9, 10, 20, 30, 40, or 50 adenine trinucleotides (where a longer run of adenines counts as the number of unique three-adenine segments within it, e.g., an adenine tetranucleotide contains two adenine trinucleotides, an adenine pentanucleotide contains three adenine trinucleotides, etc.). In some embodiments, the ORF has an adenine trinucleotide content ranging from 0% adenine trinucleotides to 0.1%, 0.2%, 0.3%, 0.4%, 0.5%, 0.6%, 0.7%, 0.8%, 0.9%, 1%, 1.5%, or 2% adenine trinucleotides, where the percentage content of adenine trinucleotides is calculated as the percentage of positions in a sequence that are occupied by adenines that form part of an adenine trinucleotide (or longer run of adenines), such that the sequences UUUAAA and UUUUAAAA would each have an adenine trinucleotide content of 50%. For example, in some embodiments, the ORF has an adenine trinucleotide content less than or equal to 2%. For example, in some embodiments, the ORF has an adenine trinucleotide content less than or equal to 1.5%. In some embodiments, the ORF has an adenine trinucleotide content less than or equal to 1%. In some embodiments, the ORF has an adenine trinucleotide content less than or equal to 0.9%. In some embodiments, the ORF has an adenine trinucleotide content less than or equal to 0.8%. In some embodiments, the ORF has an adenine trinucleotide content less than or equal to 0.7%. In some embodiments, the ORF has an adenine trinucleotide content less than or equal to 0.6%. In some embodiments, the ORF has an adenine trinucleotide content less than or equal to 0.5%. In some embodiments, the ORF has an adenine trinucleotide content less than or equal to 0.4%. In some embodiments, the ORF has an adenine trinucleotide content less than or equal to 0.3%. In some embodiments, the ORF has an adenine trinucleotide content less than or equal to 0.2%. In some embodiments, the ORF has an adenine trinucleotide content less than or equal to 0.1%. In some embodiments, a nucleic acid is provided that encodes an RNA-guided DNA-binding agent comprising an ORF containing no adenine trinucleotides.

[1378] In some embodiments, the ORF has an adenine trinucleotide content ranging from its minimum adenine trinucleotide content to the adenine trinucleotide content that is 90% or lower of the maximum adenine trinucleotide content of a reference sequence that encodes the same protein as the mRNA in question. In some embodiments, the adenine trinucleotide content of the ORF is less than or equal to about 85%, 80%, 75%, 70%, 65%, 60%, 55%, 50%, 45%, 40%, 35%, 30%, 25%, 20%, 15%, 10%, or 5% of the maximum adenine trinucleotide content of a reference sequence that encodes the same protein as the mRNA in question.

[1379] A given ORF can be reduced in adenine content or adenine dinucleotide content or adenine trinucleotide content, for example, by using minimal adenine codons in a sufficient fraction of the ORF. For example, an amino acid sequence for an RNA-guided DNA-binding agent can be back-translated into an ORF sequence by converting amino acids to codons, wherein some or all of the ORF uses the exemplary minimal adenine codons shown below. In some embodiments, at least about 50%, 55%, 60%, 65%, 70%, 75%, 80%, 85%, 90%, 95%, 98%, 99%, or 100% of the codons in the ORF are codons listed in Table 4.

TABLE 4
Exemplary minimal adenine codons

| | Amino Acid | Minimal adenine codon |
|---|---|---|
| A | Alanine | GCU or GCC or GCG |
| G | Glycine | GGU or GGC or GGG |
| V | Valine | GUC or GUU or GUG |
| D | Aspartic acid | GAC or GAU |
| E | Glutamic acid | GAG |
| I | Isoleucine | AUC or AUU |
| T | Threonine | ACU or ACC or ACG |
| N | Asparagine | AAC or AAU |
| K | Lysine | AAG |
| S | Serine | UCU or UCC or UCG |
| R | Arginine | CGU or CGC or CGG |
| L | Leucine | CUG or CUC or CUU |
| P | Proline | CCG or CCU or CCC |
| H | Histidine | CAC or CAU |
| Q | Glutamine | CAG |
| F | Phenylalanine | UUC or UUU |
| Y | Tyrosine | UAC or UAU |
| C | Cysteine | UGC or UGU |
| W | Tryptophan | UGG |
| M | Methionine | AUG |

[1380] In some embodiments, a nucleic acid is provided that encodes an RNA-guided DNA-binding agent, e.g. a Cas9 nuclease such as an S. pyogenes Cas9, comprising an ORF consisting of a set of codons of which at least about 75%, 80%, 85%, 90%, 95%, 98%, 99%, or 100% of the codons are codons listed in Table 4. In some embodiments, the ORF has minimal nucleotide homopolymers, e.g., repetitive strings of the same nucleotides. For example, in some embodiments, when selecting a minimal uridine codon from the codons listed in Table 4, a nucleic acid is constructed by selecting the minimal adenine codons that reduce the number and length of nucleotide homopolymers, e.g., selecting GCG instead of GCC for alanine or selecting GGC instead of GGG for glycine.

[1381] In any of the foregoing embodiments, the nucleic acid may be an mRNA.

[1382] In some embodiments, at least 75%, 80%, 85%, 90%, 95%, 96%, 97%, 98%, 99%, or 100% of the codons in an ORF are codons from a codon set shown in Table 5 (e.g., the low U, low A, or low A/U codon set). The codons in the low U, low A, and low A/U sets use codons that minimize the indicated nucleotides while also using codons corresponding to highly expressed tRNAs where more than one option is available. In some embodiments, at least 75%, 80%, 85%, 90%, 95%, 96%, 97%, 98%, 99%, or 100% of the codons in an ORF are codons from the low U codon set shown in Table 5. In some embodiments, at least 75%, 80%, 85%, 90%, 95%, 96%, 97%, 98%, 99%, or 100% of the codons in an ORF are codons from the low A codon set shown in Table 5. In some embodiments, at least 75%, 80%, 85%, 90%, 95%, 96%, 97%, 98%, 99%, or 100% of the codons in an ORF are codons from the low A/U codon set shown in Table 5.

TABLE 5
Exemplary Codon Sets

| Amino | | | | Long Half |
|---|---|---|---|---|
| Acid | Low U | Low A | Low A/U | Life |
| Gly | GGC | GGC | GGC | GGT |
| Glu | GAG | GAG | GAG | GAA |
| Asp | GAC | GAC | GAC | GAC |
| Val | GTG | GTG | GTG | GTC |
| Ala | GCC | GCC | GCC | GCC |
| Arg | AGA | CGG | CGG | AGA |
| Ser | AGC | TCC | AGC | TCT |
| Lys | AAG | AAG | AAG | AAG |
| Asn | AAC | AAC | AAC | AAC |
| Met | ATG | ATG | ATG | ATG |
| Ile | ATC | ATC | ATC | ATC |
| Thr | ACC | ACC | ACC | ACC |
| Trp | TGG | TGG | TGG | TGG |
| Cys | TGC | TGC | TGC | TGC |
| Tyr | TAC | TAC | TAC | TAC |
| Leu | CTG | CTG | CTG | TTG |
| Phe | TTC | TTC | TTC | TTC |
| Gln | CAG | CAG | CAG | CAA |
| His | CAC | CAC | CAC | CAC |

[1383] Exemplary Sequences

[1384] In some embodiments, the ORF encoding the RNA-guided DNA binding agent comprises a sequence with at least 90%, 93%, 95%, 96%, 97%, 98%, 99%, 99.5%, or 100% identity to any one of SEQ ID NOs: 1102-1122, 1125, 1126, or 1129-1146; and/or the ORF has at least 90%, 93%, 95%, 96%, 97%, 98%, 99%, 99.5%, or 100% identity to any one of SEQ ID NOs: 1102-1122, 1125, 1126, or 1129-1146 over at least its first 50, 200, 250, or 300 nucleotides, or at least 95% identity to any one of SEQ ID NOs: 1102-1122, 1125, 1126, or 1129-1146 over at least its first 30, 50, 70, 100, 150, 200, 250, or 300 nucleotides; and/or the ORF consists of a set of codons of which at least 95%, 96%, 97%, 98%, 99%, 99.5%, or 100% of the codons are codons listed in Table 4 or 5; and/or the ORF has an adenine content ranging from its minimum adenine content to 123% of the minimum adenine content; and/or the ORF has an adenine dinucleotide content ranging from its minimum adenine dinucleotide content to 150% of the minimum adenine dinucleotide content. In some embodiments, the polynucleotide encoding the RNA-guided DNA binding agent comprises a sequence with at least 95%, 96%, 97%, 98%, 99%, 99.5%, or 100% identity to any one of SEQ ID NOs: 1102-1122, 1125, 1126, or 1129-1146.

[1385] In some embodiments, the mRNA comprises a sequence with at least 90% identity to any one of SEQ ID NOs: 1101, 1123, 1124, or 1127, wherein the sequence comprises an ORF encoding an RNA-guided DNA binding agent. In some embodiments, the mRNA comprises a sequence with at least 90% identity to any one of SEQ ID NOs: 1101, 1123, 1124, or 1127, wherein the sequence comprises an ORF encoding an RNA-guided DNA binding agent, wherein the first three nucleotides of SEQ ID NOs: 1101, 1123, 1124, or 1127 are omitted. In some embodiments, the mRNA comprises a sequence with at least 90% identity to any one of SEQ ID NOs: 1101, 1123, 1124, or 1127, wherein the sequence comprises an ORF encoding an RNA-guided DNA binding agent, wherein the first three nucleotides of SEQ ID NOs: 1101, 1123, 1124, or 1127 are omitted and/or the ORF coding sequence contained within SEQ ID NO: 1101, 1123, 1124, or 1127 is substituted with the coding sequence of any one of SEQ ID NOs: 1102-1122, 1125, 1126, or 1129-1146. In some embodiments, any of the foregoing levels of identity is at least 95%, at least 98%, at least 99%, or 100%.

### Methods of Gene Modulation

[1386] In some embodiments, any one or more of the gRNAs (e.g., sgRNAs, dgRNAs, or crRNAs), compositions, or pharmaceutical formulations described herein is for use in preparing a medicament for treating or preventing a disease or disorder in a subject.

[1387] In some embodiments, the invention comprises a method of treating or preventing a disease or disorder in subject comprising administering any one or more of the gRNAs (e.g., sgRNAs, dgRNAs, or crRNAs), compositions, or pharmaceutical formulations described herein.

[1388] In some embodiments, the invention comprises a method or use of modifying a target DNA comprising, administering or delivering any one or more of the gRNAs (e.g., sgRNAs, dgRNAs, or crRNAs), compositions, or pharmaceutical formulations described herein.

[1389] In some embodiments, the invention comprises a method or use for modulation of a target gene comprising, administering or delivering any one or more of the gRNAs (e.g., sgRNAs, dgRNAs, or crRNAs), compositions, or pharmaceutical formulations described herein. In some embodiments, the modulation is editing of the target gene. In some embodiments, the modulation is a change in expression of the protein encoded by the target gene.

[1390] In some embodiments, the method or use results in gene editing. In some embodiments, the method or use results in a double-stranded break within the target gene. In some embodiments, the method or use results in formation of indel mutations during non-homologous end joining of the DSB. In some embodiments, the method or use results in an insertion or deletion of nucleotides in a target gene. In some embodiments, the insertion or deletion of nucleotides in a target gene leads to a frameshift mutation or premature stop codon that results in a non-functional protein. In some embodiments, the insertion or deletion of nucleotides in a target gene leads to a knockdown or elimination of target gene expression. In some embodiments, the method or use comprises homology directed repair of a DSB. In some embodiments, the method or use further comprises delivering to the cell a template, wherein at least a part of the template incorporates into a target DNA at or near a double strand break site induced by the nuclease.

[1391] In some embodiments, the method or use results in gene modulation. In some embodiments, the gene modulation is an increase or decrease in gene expression, a change in methylation state of DNA, or modification of a histone subunit. In some embodiments, the method or use results in increased or decreased expression of the protein encoded by the target gene.

[1392] The efficacy of gRNAs (e.g., sgRNAs, dgRNAs, or crRNAs) can be tested in vitro and in vivo. In some embodiments, the invention comprises one or more of the gRNAs (e.g., sgRNAs, dgRNAs, or crRNAs), compositions, or pharmaceutical formulations described herein, wherein the gRNA results in gene modulation when provided to a cell together with Cas9 or mRNA encoding Cas9. In some embodiments, the efficacy of gRNA can be measured in vitro or in vivo.

[1393] In some embodiments, the activity of a Cas RNP comprising a gRNA is compared to the activity of a Cas RNP comprising an unmodified sgRNA or a reference sgRNA lacking modifications present in the sgRNA, such as one or more shortened regions and/or YA site substitutions.

[1394] In some embodiments, the efficiency of a gRNA in increasing or decreasing target protein expression is determined by measuring the amount of target protein.

[1395] In some embodiments, the efficiency of editing with specific gRNAs is determined by the editing present at the target location in the genome following delivery of Cas9 and the gRNA. In some embodiments, the efficiency of editing with specific gRNAs is measured by next-generation sequencing. In some embodiments, the editing percentage of the target region of interest is determined. In some embodiments, the total number of sequence reads with insertions or deletions of nucleotides into the target region of interest over the total number of sequence reads is measured following delivery of a gRNA and Cas9.

[1396] In some embodiments, the efficiency of editing with specific gRNAs is measured by the presence of insertions or deletions of nucleotides introduced by successful gene editing. In some embodiments, activity of a Cas9 and gRNAs is tested in biochemical assays. In some embodiments, activity of a Cas9 and gRNAs is tested in a cell-free cleavage assay. In some embodiments, activity of a Cas9 and gRNAs is tested in Neuro2A cells.

[1397] In some embodiments, the activity of modified gRNAs is measured after in vivo dosing of LNPs comprising modified gRNAs and Cas protein or mRNA encoding Cas protein.

[1398] In some embodiments, in vivo efficacy of a gRNA or composition provided herein is determined by editing efficacy measured in DNA extracted from tissue (e.g., liver tissue) after administration of gRNA and Cas9.

[1399] In some embodiments, activation of the subject's immune response is measured by serum concentrations of cytokine(s) following in vivo dosing of sgRNA together with Cas9 mRNA or protein (e.g., formulated in a LNP). In some embodiments, the cytokine is interferon-alpha (IFN-alpha), interleukin 6 (IL-6), monocyte chemotactic protein 1 (MCP-1), and/or tumor necrosis factor alpha (TNF-alpha).

[1400] In some embodiments, administration of Cas RNP or Cas9 mRNA together with the modified gRNA (e.g., sgRNA, or dgRNA) produces lower serum concentration(s) of immune cytokines compared to administration of unmodified sgRNA. In some embodiments, the invention comprises a method of reducing a subject's serum concentration of immune cytokines comprising, administering any one of the gRNAs disclosed herein, wherein the gRNA produces a lower concentration of immune cytokines in a subject's serum as compared to a control gRNA that is not similarly modified.

LNP Delivery of gRNA

[1401] Lipid nanoparticles (LNPs) are a well-known means for delivery of nucleotide and protein cargo, and may be used for delivery of the gRNAs (e.g., sgRNAs, dgRNAs, or crRNAs), compositions, or pharmaceutical formulations disclosed herein. In some embodiments, the LNPs deliver nucleic acid, protein, or nucleic acid together with protein.

[1402] In some embodiments, the invention comprises a method for delivering any one of the gRNAs (e.g., sgRNAs, dgRNAs, or crRNAs) disclosed herein to a subject, wherein the gRNA is associated with an LNP. In some embodiments, the gRNA/LNP is also associated with a Cas9 or an mRNA encoding Cas9.

[1403] In some embodiments, the invention comprises a composition comprising any one of the gRNAs disclosed and an LNP. In some embodiments, the composition further comprises a Cas9 or an mRNA encoding Cas9.

[1404] In some embodiments, the LNPs comprise cationic lipids. In some embodiments, the LNPs comprise (9Z,12Z)-3-((4,4-bis(octyloxy)butanoyl)oxy)-2-((((3-(diethylamino)propoxy)carbonyl)oxy)methyl)propyl octadeca-9,12-dienoate, also called 3-((4,4-bis(octyloxy)butanoyl)oxy)-2-((((3-(diethylamino)propoxy)carbonyl)oxy)methyl)propyl (9Z,12Z)-octadeca-9,12-dienoate). In some embodiments, the LNPs comprise molar ratios of a cationic lipid amine to RNA phosphate (N:P) of about 4.5.

[1405] In some embodiments, LNPs associated with the gRNAs disclosed herein are for use in preparing a medicament for treating a disease or disorder.

[1406] Electroporation is a well-known means for delivery of cargo, and any electroporation methodology may be used for delivery of any one of the gRNAs disclosed herein. In some embodiments, electroporation may be used to deliver any one of the gRNAs disclosed herein and Cas9 or an mRNA encoding Cas9.

[1407] In some embodiments, the invention comprises a method for delivering any one of the gRNAs disclosed herein to an ex vivo cell, wherein the gRNA is associated with an LNP or not associated with an LNP. In some embodiments, the gRNA/LNP or gRNA is also associated with a Cas9 or an mRNA encoding Cas9.

[1408] This description and exemplary embodiments should not be taken as limiting. For the purposes of this specification and appended claims, unless otherwise indicated, all numbers expressing quantities, percentages, or proportions, and other numerical values used in the specification and claims, are to be understood as being modified in all instances by the term “about,” to the extent they are not already so modified. “About” indicates a degree of variation that does not substantially affect the properties of the described subject matter, e.g., within 10%, 5%, 2%, or 1%. Accordingly, unless indicated to the contrary, the numerical parameters set forth in the following specification and attached claims are approximations that may vary depending upon the desired properties sought to be obtained. At the very least, and not as an attempt to limit the application of the doctrine of equivalents to the scope of the claims, each numerical parameter should at least be construed in light of the number of reported significant digits and by applying ordinary rounding techniques.

[1409] It is noted that, as used in this specification and the appended claims, the singular forms “a,” “an,” and “the,” and any singular use of any word, include plural referents unless expressly and unequivocally limited to one referent. As used herein, the term “include” and its grammatical variants are intended to be non-limiting, such that recitation of items in a list is not to the exclusion of other like items that can be substituted or added to the listed items.

### EXAMPLES

[1410] The following examples are provided to illustrate certain disclosed embodiments and are not to be construed as limiting the scope of this disclosure in any way.

### Example 1—In Vitro Editing in Primary Mouse Hepatocytes (PMH)

[1411] Short sgRNAs targeting the mouse and cyno TTR gene were designed as shown in Table 1A and lipofected, as provided below, into primary mouse hepatocytes (PMH). PMH (Gibco, Lot #793) were thawed and resuspended in hepatocyte thawing medium with supplements (Gibco, Cat. CM7500) followed by centrifugation. The supernatant was discarded and the pelleted cells resuspended in hepatocyte plating medium plus supplement pack (Invitrogen, Cat. A1217601 and CM3000). Cells were counted and plated on Bio-coat collagen I coated 96-well plates (ThermoFisher, Cat. 877272) at a density of 15,000 cells/well for PMH. Plated cells were allowed to settle and adhere for 5 hours in a tissue culture incubator at 37° C. and 5% CO2 atmosphere. After incubation cells were checked for monolayer formation and were washed once with hepatocyte culture medium (Takara, Cat. Y20020 and/or Invitrogen, Cat. A1217601 and CM4000). Lipofection of Cas9 mRNA and gRNAs used pre-mixed lipid formulations. The lipofection reagent contained ionizable lipid ((9Z,12Z)-3-((4,4-bis(octyloxy)butanoyl)oxy)-2-((((3-(diethylamino)propoxy)carbonyl)oxy)methyl)propyl octadeca-9,12-dienoate, also called 3-((4,4-bis(octyloxy)butanoyl)oxy)-2-(((((3-(diethylamino)propoxy)carbonyl)oxy)methyl)propyl (9Z,12Z)-octadeca-9,12-dienoate), cholesterol, DSPC, and PEG2k-DMG in a 50:38:9:3 molar ratio, respectively. This mixture was reconstituted in 100% ethanol then mixed with RNA cargos (e.g., Cas9 mRNA and gRNA) at a lipid amine to RNA phosphate (N:P) molar ratio of about 6.0. Guide RNA was chemically synthesized by commercial vendors or using standard in vitro synthesis techniques with modified nucleotides. A Cas9 ORF of Table 1B was produced by in vitro transcription (IVT) as described in WO2019/067910, see e.g. ¶354, using a 2 hour IVT reaction time and purifying the mRNA by LiCl precipitation followed by tangential flow filtration.

[1412] Lipofections were performed with 6% cynomolgus monkey serum and a ratio of gRNA to mRNA of 1:1 by weight.

[1413] Genomic DNA Isolation

[1414] PMH cells were harvested post-transfection at 72 hours. The gDNA was extracted from each well of a 96-well plate using 50 μL/well QuickExtract DNA Extraction solution (Epicentre, Cat. QE09050) according to manufacturer's protocol.

[1415] Next-Generation Sequencing (“NGS”) and Analysis for Editing Efficiency

[1416] To quantitatively determine the efficiency of editing at the target location in the genome, sequencing was utilized to identify the presence of insertions and deletions introduced by gene editing. PCR primers were designed around the target site within the gene of interest (e.g. TTR), and the genomic area of interest was amplified. Primer sequence design was done as is standard in the field.

[1417] Additional PCR was performed according to the manufacturer's protocols (Illumina) to add chemistry for sequencing. The amplicons were sequenced on an Illumina MiSeq instrument. The reads were aligned to the reference genome (e.g., hg38) after eliminating those having low quality scores. The resulting files containing the reads were mapped to the reference genome (BAM files), where reads that overlapped the target region of interest were selected and the number of wild type reads versus the number of reads which contain an insertion or deletion (“indel”) was calculated.

[1418] The editing percentage (e.g., the “editing efficiency” or “percent editing”) is defined as the total number of sequence reads with insertions or deletions (“indels”) over the total number of sequence reads, including wild type.

[1419] Dose response of editing efficiency to guide concentration was performed in duplicate samples. Table 6 show mean and standard deviation (SD) editing at each guide concentration and a calculated EC₅₀ value.

TABLE 6
Editing in primary mouse hepatocytes

| | | | Guide | | |
|---|---|---|---|---|---|
| | EC₅₀ | | concentration | Mean | |
| Guide | (nM) | SEM | (nM) | % Edit | SD |
| G013772 | 38.0 | n/d | 150 | 3% | 0% |
| | | | 75 | 5% | 2% |
| | | | 38 | 2% | 1% |
| | | | 19 | 1% | 0% |
| | | | 9 | 0% | 0% |
| | | | 5 | 0% | 0% |
| | | | 2 | 0% | 0% |
| G013773 | 12.7 | 1.4 | 150 | 96% | 2% |
| | | | 75 | 96% | 4% |
| | | | 38 | 90% | 1% |
| | | | 19 | 72% | 5% |
| | | | 9 | 42% | 7% |
| | | | 5 | 28% | 7% |
| | | | 2 | 20% | 10% |
| G013774 | n/d | n/d | 150 | 2% | 0% |
| | | | 75 | 3% | 0% |
| | | | 38 | 1% | 0% |
| | | | 19 | 1% | 0% |
| | | | 9 | 0% | 0% |
| | | | 5 | 0% | 0% |
| | | | 2 | 0% | 0% |
| G013775 | n/d | n/d | 150 | 0% | 0% |
| | | | 75 | 0% | 0% |
| | | | 38 | 0% | 0% |
| | | | 19 | 0% | 0% |
| | | | 9 | 0% | 0% |
| | | | 5 | 0% | 0% |
| | | | 2 | 0% | 0% |
| G013776 | 10.1 | 1.9 | 150 | 96% | 0% |
| | | | 75 | 94% | 0% |
| | | | 38 | 89% | 6% |
| | | | 19 | 71% | 11% |
| | | | 9 | 52% | 16% |
| | | | 5 | 25% | 9% |
| | | | 2 | 15% | 11% |
| G010039 | 13.4 | 2.0 | 150 | 83% | 0% |
| | | | 75 | 81% | 3% |
| | | | 38 | 72% | 0% |
| | | | 19 | 53% | 22% |
| | | | 9 | 32% | 10% |
| | | | 5 | 12% | 6% |
| | | | 2 | 6% | 1% |
| G012402 | 7.9 | 0.8 | 150 | 86% | 0% |
| | | | 75 | 86% | 1% |
| | | | 38 | 81% | 7% |
| | | | 19 | 73% | 6% |
| | | | 9 | 60% | 6% |
| | | | 5 | 33% | 6% |
| | | | 2 | 23% | 4% |
| G012401 | 8.5 | 1.1 | 150 | 97% | 0% |
| | | | 75 | 94% | 1% |
| | | | 38 | 89% | 2% |
| | | | 19 | 82% | 2% |
| | | | 9 | 61% | 14% |
| | | | 5 | 33% | 12% |
| | | | 2 | 23% | 7% |

### Example 2—In Vitro Editing of Deletion Series in Primary Cynomologus Hepatocytes (PCH)

[1420] Additional sgRNAs targeting mouse and cynomolgus monkey TTR genes were designed as shown in Table 1A and lipofected into primary cynomolgus monkey hepatocytes (PCH). Cells were prepared, treated and analyzed as described above unless otherwise noted. Specifically, PCH cells from In Vitro ADMET Laboratories, Inc. Lot #10281011 were used and plated at a density of 50,000 cells/well. Duplicate samples were included in the assay except for G015651 which was assayed singly. Mean editing results with standard deviation are shown in Table 7 and FIG. 2.

TABLE 7
In vitro editing in PCH

| Guide | Mean % Edit | SD |
|---|---|---|
| G015631 | 38.3% | 14.9% |
| G015632 | 41.4% | 14.5% |
| G015633 | 41.5% | 2.8% |
| G015634 | 5.4% | 3.6% |
| G015635 | 57.0% | 7.8% |
| G015636 | 57.3% | 8.8% |
| G015637 | 67.1% | 8.7% |
| G015638 | 60.5% | 1.3% |
| G015639 | 65.0% | 4.8% |
| G015640 | 62.5% | 2.0% |
| G015641 | 64.5% | 2.1% |
| G015642 | 69.1% | 2.5% |
| G015643 | 49.0% | 5.0% |
| G015644 | 32.6% | 8.8% |
| G015645 | 3.5% | 0.4% |
| G015646 | 38.4% | 17.1% |
| G015647 | 51.4% | 7.4% |
| G015648 | 55.3% | 19.6% |
| G015649 | 52.5% | 2.8% |
| G015650 | 45.3% | 12.3% |
| G015651 | 44.9% | n/a |
| G015652 | 58.3% | 16.3% |
| G015653 | 53.1% | 15.3% |
| G015654 | 43.2% | 16.8% |
| G015655 | 47.0% | 6.3% |
| G015656 | 31.1% | 11.2% |
| G015656 | 25.6% | 8.3% |
| G015657 | 12.0% | 6.7% |
| G015658 | 13.2% | 10.4% |
| G015659 | 6.5% | 6.4% |
| G015660 | 10.3% | 6.4% |
| G015661 | 15.4% | 13.4% |
| G015662 | 8.0% | 4.2% |
| G015663 | 17.5% | 9.8% |
| G015664 | 22.8% | 17.7% |
| G015665 | 36.4% | 19.5% |
| G015666 | 15.9% | 14.6% |
| G015667 | 1.1% | 0.4% |
| G015668 | 1.1% | 0.1% |
| G015669 | 1.5% | 0.4% |
| G015670 | 0.9% | 0.1% |
| G015671 | 14.2% | 4.1% |
| G015672 | 1.7% | 0.1% |
| G015673 | 18.7% | 11.2% |
| G015674 | 4.9% | 2.4% |
| G015675 | 2.2% | 0.1% |
| G015676 | 3.3% | 3.4% |
| G015677 | 1.4% | 0.8% |
| G015678 | 48.8% | 6.5% |
| G015679 | 5.8% | 1.3% |
| G015680 | 1.9% | 0.4% |
| G015681 | 1.5% | 0.1% |
| G015682 | 1.2% | 0.1% |
| G015683 | 1.0% | 0.1% |
| G015684 | 1.1% | 0.4% |
| G015685 | 37.5% | 8.9% |
| G015686 | 42.7% | 10.3% |
| G015687 | 38.8% | 21.6% |
| G015688 | 40.5% | 12.0% |
| G015689 | 25.7% | 17.5% |
| G015690 | 8.2% | 6.8% |
| G015691 | 16.9% | 12.9% |
| G015692 | 50.7% | 17.9% |
| G015693 | 41.9% | 8.0% |
| G015694 | 32.6% | 17.2% |
| G015695 | 43.6% | 7.6% |
| G015696 | 38.7% | 12.0% |
| G015697 | 23.3% | 15.8% |
| G015698 | 44.0% | 13.7% |
| G015699 | 38.4% | 19.4% |
| G015700 | 0.8% | 0.1% |
| G015701 | 40.0% | 21.2% |
| G015702 | 0.8% | 0.1% |
| G000502 | 47.3% | 10.1% |
| G012401 | 51.4% | 13.1% |

### Example 3—In Vitro Editing of Additional Guides in PCH Using Lipofection

[1421] sgRNAs targeting cynomolgus monkey TTR genes were designed as shown in Table 1A that combined deletions or chemical modifications in different regions of the sgRNA constant region. Guides and Cas9 mRNA were lipofected into primary cynomolgus monkeyhepatocytes (PCH). Cells were prepared, treated and analyzed as described above unless otherwise noted. Guides were assayed in a 7 point 2-fold dose response curve starting at 50 nM guide concentration as shown in Tables 8-9. Duplicate samples were included in the assay except for G000502 which was assayed in quadruplicate. EC₅₀ values and mean editing results are shown in Tables 8-9. Dose response curves are plotted in FIG. 3A and FIG. 3B.

TABLE 8
Editing efficiency in PCH using lipofection

| | | | Guide | | |
|---|---|---|---|---|---|
| | | EC₅₀ | concentration | Mean % | |
| Guide | EC₅₀ | SEM | (nM) | Edit | SD |
| G000502 | 5.3 | 0.2 | 100 | 87.6 | 2.1 |
| | | | 50 | 85.1 | 2.4 |
| | | | 25 | 81.1 | 1.9 |
| | | | 12.5 | 72.4 | 1.0 |
| | | | 6.25 | 51.8 | 2.7 |
| | | | 3.125 | 24.8 | 2.1 |
| | | | 1.563 | 11.5 | 3.1 |
| | | | 0.781 | 5 | 0.4 |
| G012401 | 6.8 | 0.4 | 100 | 86.9 | 2.7 |
| | | | 50 | 84.1 | 2.9 |
| | | | 25 | 77.4 | 0.2 |
| | | | 12.5 | 61.7 | 3.8 |
| | | | 6.25 | 45.1 | 0.7 |
| | | | 3.125 | 17.8 | 1.5 |
| | | | 1.563 | 10.8 | 2.4 |
| | | | 0.781 | 4.2 | 1.4 |
| G009978 | 12.5 | 0.6 | 100 | 87.2 | 3.4 |
| | | | 50 | 82.3 | 3.8 |
| | | | 25 | 66.5 | 3.6 |
| | | | 12.5 | 47.0 | 0.4 |
| | | | 6.25 | 24.7 | 2.6 |
| | | | 3.125 | 12.4 | 0.4 |
| | | | 1.563 | 4.6 | 0 |
| | | | 0.781 | 2.3 | 0.2 |
| G017275 | 7.0 | 0.3 | 100 | 82.2 | 7.3 |
| | | | 50 | 84.2 | n/a |
| | | | 25 | 78.1 | 3.2 |
| | | | 12.5 | 64.8 | 1.7 |
| | | | 6.25 | 39.5 | 2.3 |
| | | | 3.125 | 18.0 | 2.4 |
| | | | 1.563 | 9.6 | 0.6 |
| | | | 0.781 | 5.6 | 0.4 |
| G015642 | 12.5 | 0.8 | 100 | 87.6 | 0.9 |
| | | | 50 | 83.2 | 0.4 |
| | | | 25 | 66.5 | 1.9 |
| | | | 12.5 | 45.3 | 0.2 |
| | | | 6.25 | 29.9 | 0.1 |
| | | | 3.125 | 11.6 | 4.0 |
| | | | 1.563 | 5.2 | 0.4 |
| | | | 0.781 | 2.5 | 0.7 |
| G015648 | 16.5 | 0.7 | 100 | 87.8 | 3.1 |
| | | | 50 | 78.6 | 1.2 |
| | | | 25 | 60.8 | 2.9 |
| | | | 12.5 | 37.6 | 1.6 |
| | | | 6.25 | 18.3 | 2.6 |
| | | | 3.125 | 6.6 | 1.6 |
| | | | 1.563 | 3.2 | 1.0 |
| | | | 0.781 | 2.2 | 0.7 |
| G015652 | 10.7 | 0.5 | 100 | 85.9 | 3.3 |
| | | | 50 | 86 | 2.5 |
| | | | 25 | 73.1 | 0.9 |
| | | | 12.5 | 49.5 | 2.6 |
| | | | 6.25 | 29.5 | 0.2 |
| | | | 3.125 | 10.5 | 0.4 |
| | | | 1.563 | 5.6 | 0.5 |
| | | | 0.781 | 3.4 | 1.5 |
| G015653 | 20.2 | 0.4 | 100 | 80.7 | 0.7 |
| | | | 50 | 72.6 | 0.1 |
| | | | 25 | 50.7 | 1.4 |
| | | | 12.5 | 26.3 | 0.7 |
| | | | 6.25 | 11.0 | 1.0 |
| | | | 3.125 | 3.7 | 0.1 |
| | | | 1.563 | 2.1 | 0.6 |
| | | | 0.781 | 1.2 | 0 |
| G015655 | 30.0 | 0.8 | 100 | 71.6 | 1.4 |
| | | | 50 | 59.2 | 1.9 |
| | | | 25 | 30.7 | 1.3 |
| | | | 12.5 | 10.5 | 0.3 |
| | | | 6.25 | 5.2 | 0.2 |
| | | | 3.125 | 2.3 | 0.1 |
| | | | 1.563 | 1.0 | 0.3 |
| | | | 0.781 | 0.7 | 0.2 |

TABLE 9
Editing efficiency in PCH using lipofection

| | | | Guide | | |
|---|---|---|---|---|---|
| | | EC₅₀ | concentration | Mean % | |
| Guide | EC₅₀ | SEM | (nM) | Edit | SD |
| G000502 | 5.9 | 0.5 | 50 | 75.2 | 4.4 |
| | | | 25 | 71.5 | 3.7 |
| | | | 12.5 | 61.4 | 6.6 |
| | | | 6.25 | 40.6 | 10.6 |
| | | | 3.125 | 19 | 2.9 |
| | | | 1.563 | 7.6 | 0.3 |
| | | | 0.781 | 3 | 0.6 |
| G017276 | 6.2 | 1.0 | 50 | 73.9 | 12.4 |
| | | | 25 | 68.6 | 2.3 |
| | | | 12.5 | 55.7 | 2.0 |
| | | | 6.25 | 42.0 | 2.2 |
| | | | 3.125 | 24.1 | 0.7 |
| | | | 1.563 | 12.3 | 0.7 |
| | | | 0.781 | 7.5 | 2.3 |
| G017277 | 5.9 | 1.2 | 50 | 69.7 | 0.7 |
| | | | 25 | 70.5 | 14.0 |
| | | | 12.5 | 52.2 | 0.1 |
| | | | 6.25 | 39.9 | 6.1 |
| | | | 3.125 | 23.7 | 4.3 |
| | | | 1.563 | 9.5 | 1.7 |
| | | | 0.781 | 4.6 | 1.8 |
| G017278 | 6.5 | 0.8 | 50 | 71.8 | 8.9 |
| | | | 25 | 70.8 | 4.5 |
| | | | 12.5 | 61.9 | 11.8 |
| | | | 6.25 | 38.8 | 5.9 |
| | | | 3.125 | 17.3 | 1.8 |
| | | | 1.563 | 11.9 | 4.4 |
| | | | 0.781 | 6.6 | 3.7 |
| G017279 | 7.0 | 1.5 | 50 | 69.8 | 1.9 |
| | | | 25 | 67.0 | 16.1 |
| | | | 12.5 | 53.4 | 0.2 |
| | | | 6.25 | 35.4 | 1.9 |
| | | | 3.125 | 24.0 | 3.7 |
| | | | 1.563 | 11.9 | 5.9 |
| | | | 0.781 | 7.9 | 0.5 |
| G017280 | 11.8 | 2.9 | 50 | 79.7 | 5.0 |
| | | | 25 | 67.3 | 13.3 |
| | | | 12.5 | 47.4 | 3.2 |
| | | | 6.25 | 29.2 | 0.8 |
| | | | 3.125 | 15.7 | 2.2 |
| | | | 1.563 | 6.1 | 1.1 |
| | | | 0.781 | 2.3 | 0.9 |
| G017281 | 18.1 | 8.6 | 50 | 74.4 | 3.6 |
| | | | 25 | 57.9 | 6.8 |
| | | | 12.5 | 41.0 | 3.9 |
| | | | 6.25 | 23.9 | 4.6 |
| | | | 3.125 | 14.7 | 6.3 |
| | | | 1.563 | 5.1 | 1.6 |
| | | | 0.781 | 3.3 | 1.8 |
| G017282 | 10.3 | 1.9 | 50 | 57.9 | 2.5 |
| | | | 25 | 71.1 | 1.6 |
| | | | 12.5 | 36.0 | 5.6 |
| | | | 6.25 | 21.0 | 11.5 |
| | | | 3.125 | 10.8 | 0.5 |
| | | | 1.563 | 3.1 | 1.7 |
| | | | 0.781 | 1.9 | 0.9 |
| G017283 | 15.6 | 1.4 | 50 | 56.1 | 5.2 |
| | | | 25 | 44.5 | 0.1 |
| | | | 12.5 | 24.9 | 4.3 |
| | | | 6.25 | 9.9 | 0.3 |
| | | | 3.125 | 3.2 | 0.0 |
| | | | 1.563 | 1.3 | 0.5 |
| | | | 0.781 | 0.8 | 0.2 |

### Example 4—In Vitro Editing of Additional Guides in PMH and PCH Using Lipid Nanoparticles

[1422] sgRNAs targeting mouse and cynomolgus monkey TTR genes were designed as shown in Table 1A that combined deletions or chemical modifications in different regions of the sgRNA constant region. These guides were tested for efficacy in primary mouse and primary cynomolgus monkey hepatocytes using lipid nanoparticles to deliver Cas9 mRNA and sgRNA.

[1423] In general, the lipid nanoparticle components were dissolved in 100% ethanol at various molar ratios. The RNA cargos (e.g., Cas9 mRNA and sgRNA) were dissolved in 25 mM citrate, 100 mM NaCl, pH 5.0, resulting in a concentration of RNA cargo of approximately 0.45 mg/mL. The LNPs used in Examples 5-6 contained ionizable lipid ((9Z,12Z)-3-((4,4-bis(octyloxy)butanoyl)oxy)-2-((((3-(diethylamino)propoxy)carbonyl)oxy)methyl)propyl octadeca-9,12-dienoate, also called 3-((4,4-bis(octyloxy)butanoyl)oxy)-2-((((3-(diethylamino)propoxy)carbonyl)oxy)methyl)propyl (9Z,12Z)-octadeca-9,12-dienoate), cholesterol, DSPC, and PEG2k-DMG in a 50:38:9:3 molar ratio, respectively. The LNPs were formulated with a lipid amine to RNA phosphate (N:P) molar ratio of about 6, and a ratio of gRNA to mRNA of 1:2 by weight.

[1424] The LNPs were prepared using a cross-flow technique utilizing impinging jet mixing of the lipid in ethanol with two volumes of RNA solutions and one volume of water. The lipid mixture in ethanol was mixed through a mixing cross with the two volumes of RNA solution. A fourth stream of water was mixed with the outlet stream of the cross through an inline tee (See WO2016010840 FIG. 2). The resulting LNPs were held for 1 hour at room temperature, and further diluted with water (approximately 1:1 v/v). Diluted LNPs were buffer exchanged using PD-10 desalting columns (GE) into 50 mM Tris, 45 mM NaCl, 5% (w/v) sucrose, pH 7.5 (TSS). The resulting mixture was then filtered using a 0.2 μm sterile filter and optionally further diluted. The final LNP was stored at 4° C. or −80° C. until further use.

[1425] Lipid nanoparticle (LNP) formulations of sgRNAs were tested on PMH and PCH in a dose response assays. PMH and PCH were prepared as in Example 1 and Example 2, respectively. In addition, cells were incubated at 37° C., 5% CO₂ for 24 hours prior to treatment with LNPs. LNPs were incubated in media containing 6% fetal bovine serum (FBS) at 37° C. for 10 minutes. Post-incubation the LNPs were added to the mouse or cynomolgus hepatocytes in an 8 point 3-fold dose response curve starting at 300 ng Cas9 mRNA. The cells were lysed 96 hours post-treatment for NGS analysis as described in Example 1. Duplicate samples were included in the assay. EC₅₀ values and mean editing results for PMH are shown in Table 10 and plotted as dose response curves in FIGS. 4A and 4B. EC₅₀ values and mean editing results for PCH are shown in Table 11A and plotted as dose response curves in FIGS. 5A and 5B.

[1426] The precise formulation of guides in LNPs achieve lower EC50s and higher percent editing as compared to the above experiments that used transfection-based delivery methods termed lipofection.

TABLE 10
Table 10 - In vitro editing in PMH using lipid nanoparticles

| | | | Guide | | |
|---|---|---|---|---|---|
| | | EC₅₀ | concentration | Mean % | |
| Guide | EC₅₀ | SEM | (nM) | Edit | SD |
| G000502 | 1.54 | 0.03 | 46.56 | 97.0 | 0.1 |
| | | | 23.28 | 97.7 | 1.0 |
| | | | 11.64 | 97.8 | 0.1 |
| | | | 5.82 | 96.2 | 0.1 |
| | | | 2.91 | 82.7 | 1.8 |
| | | | 1.46 | 45.6 | 4.8 |
| | | | 0.73 | 10.5 | 1.8 |
| | | | 0.36 | 2.1 | 0.2 |
| G017275 | 1.61 | 0.02 | 46.56 | 98.1 | 0.2 |
| | | | 23.28 | 98.1 | 0.1 |
| | | | 11.64 | 98.3 | 0.6 |
| | | | 5.82 | 95.3 | 0.3 |
| | | | 2.91 | 82.1 | 2.1 |
| | | | 1.46 | 42.7 | 0.7 |
| | | | 0.73 | 12.6 | 0.7 |
| | | | 0.36 | 2.1 | 0.6 |
| G015648 | 1.38 | 0.02 | 46.56 | 97.8 | 0.1 |
| | | | 23.28 | 98.1 | 0.1 |
| | | | 11.64 | 97.9 | 0.3 |
| | | | 5.82 | 96.4 | 0.4 |
| | | | 2.91 | 88.1 | 1.2 |
| | | | 1.46 | 52.7 | 0.5 |
| | | | 0.73 | 18.2 | 0.4 |
| | | | 0.36 | 4.1 | 0.3 |
| G015652 | 2.17 | 0.03 | 46.56 | 97.9 | 0.3 |
| | | | 23.28 | 98.4 | 0.0 |
| | | | 11.64 | 98.0 | 0.4 |
| | | | 5.82 | 92.4 | 1.5 |
| | | | 2.91 | 66.4 | 0.6 |
| | | | 1.46 | 26.8 | 0.1 |
| | | | 0.73 | 5.1 | 1.2 |
| | | | 0.36 | 1.1 | 0.1 |
| G015653 | 2.31 | 0.04 | 46.56 | 97.7 | 0.0 |
| | | | 23.28 | 98.0 | 0.6 |
| | | | 11.64 | 96.9 | 1.2 |
| | | | 5.82 | 91.3 | 2.0 |
| | | | 2.91 | 62.1 | 0.4 |
| | | | 1.46 | 23.8 | 1.9 |
| | | | 0.73 | 3.8 | 0.1 |
| | | | 0.36 | 0.8 | 0.1 |
| G015655 | 4.09 | 0.03 | 46.56 | 97.7 | 1.0 |
| | | | 23.28 | 97.9 | 0.6 |
| | | | 11.64 | 95.2 | 0.1 |
| | | | 5.82 | 72.8 | 0.5 |
| | | | 2.91 | 26.6 | 1.3 |
| | | | 1.46 | 4.6 | 0.4 |
| | | | 0.73 | 0.9 | 0.1 |
| | | | 0.36 | 0.4 | 0.1 |
| G017281 | 1.32 | 0.02 | 46.56 | 98.1 | 0.4 |
| | | | 23.28 | 98.4 | 0.2 |
| | | | 11.64 | 98.4 | 0.9 |
| | | | 5.82 | 96.4 | 0.2 |
| | | | 2.91 | 87.9 | 2.8 |
| | | | 1.46 | 56.3 | 0.2 |
| | | | 0.73 | 17.6 | 1.8 |
| | | | 0.36 | 4.7 | 1.1 |
| G017282 | 2.00 | 0.03 | 46.56 | 97.9 | 0.4 |
| | | | 23.28 | 98.2 | 0.2 |
| | | | 11.64 | 97.4 | 0.6 |
| | | | 5.82 | 93.3 | 0.0 |
| | | | 2.91 | 70.7 | 2.3 |
| | | | 1.46 | 30.5 | 1.8 |
| | | | 0.73 | 6.8 | 1.1 |
| | | | 0.36 | 1.4 | 0.2 |
| G017283 | 3.63 | 0.03 | 46.56 | 97.7 | 0.4 |
| | | | 23.28 | 97.6 | 0.4 |
| | | | 11.64 | 95.4 | 0.8 |
| | | | 5.82 | 78.1 | 1.8 |
| | | | 2.91 | 34.0 | 1.1 |
| | | | 1.46 | 7.1 | 0.8 |
| | | | 0.73 | 1.2 | 0.1 |
| | | | 0.36 | 0.4 | 0.2 |
| G000502 | 1.56 | 0.02 | 46.56 | 97.2 | 0.1 |
| | | | 23.28 | 97.5 | 0.7 |
| | | | 11.64 | 97.8 | 0.3 |
| | | | 5.82 | 96.0 | 0.0 |
| | | | 2.91 | 81.7 | 2.3 |
| | | | 1.46 | 44.7 | 1.4 |
| | | | 0.73 | 13.2 | 1.7 |
| | | | 0.36 | 2.6 | 0.2 |
| G012401 | 1.14 | 0.02 | 46.56 | 98.1 | 0.2 |
| | | | 23.28 | 98.7 | 0.2 |
| | | | 11.64 | 98.6 | 0.1 |
| | | | 5.82 | 97.1 | 0.4 |
| | | | 2.91 | 90.3 | 1.4 |
| | | | 1.46 | 64.5 | 1.9 |
| | | | 0.73 | 25.3 | 0.8 |
| | | | 0.36 | 6.7 | 0.0 |
| G009978 | 1.68 | 0.02 | 46.56 | 97.9 | 0.5 |
| | | | 23.28 | 98.6 | 0.1 |
| | | | 11.64 | 97.6 | 0.4 |
| | | | 5.82 | 93.5 | 0.4 |
| | | | 2.91 | 75.8 | 1.2 |
| | | | 1.46 | 41.4 | 1.3 |
| | | | 0.73 | 11.3 | 0.4 |
| | | | 0.36 | 2.5 | 0.1 |
| G015642 | 1.24 | 0.03 | 46.56 | 98.2 | 0.2 |
| | | | 23.28 | 98.3 | 0.4 |
| | | | 11.64 | 97.8 | 0.5 |
| | | | 5.82 | 96.0 | 0.3 |
| | | | 2.91 | 88.4 | 0.1 |
| | | | 1.46 | 57.4 | 0.5 |
| | | | 0.73 | 24.5 | 2.8 |
| | | | 0.36 | 6.2 | 0.8 |
| G017276 | 1.09 | 0.02 | 46.56 | 97.7 | 0.9 |
| | | | 23.28 | 98.7 | 0.4 |
| | | | 11.64 | 98.5 | 0.1 |
| | | | 5.82 | 96.8 | 1.2 |
| | | | 2.91 | 89.0 | 0.6 |
| | | | 1.46 | 65.8 | 1.9 |
| | | | 0.73 | 28.5 | 1.1 |
| | | | 0.36 | 8.2 | 1.0 |
| G017277 | 1.12 | 0.03 | 46.56 | 98.5 | 0.3 |
| | | | 23.28 | 98.4 | 0.0 |
| | | | 11.64 | 98.2 | 0.6 |
| | | | 5.82 | 96.9 | 0.1 |
| | | | 2.91 | 90.7 | 0.6 |
| | | | 1.46 | 63.1 | 0.6 |
| | | | 0.73 | 29.6 | 3.2 |
| | | | 0.36 | 8.4 | 1.3 |
| G017278 | 1.22 | 0.02 | 46.56 | 97.8 | 0.8 |
| | | | 23.28 | 98.7 | 0.2 |
| | | | 11.64 | 97.7 | 0.1 |
| | | | 5.82 | 96.8 | 0.1 |
| | | | 2.91 | 88.6 | 0.3 |
| | | | 1.46 | 59.8 | 2.8 |
| | | | 0.73 | 23.8 | 0.7 |
| | | | 0.36 | 6.6 | 0.7 |
| G017280 | 1.27 | 0.03 | 46.56 | 98.6 | 0.0 |
| | | | 23.28 | 98.6 | 0.1 |
| | | | 11.64 | 98.3 | 0.5 |
| | | | 5.82 | 96.4 | 0.6 |
| | | | 2.91 | 89.8 | 0.8 |
| | | | 1.46 | 56.8 | 1.3 |
| | | | 0.73 | 24.5 | 0.6 |
| | | | 0.36 | 6.6 | 0.8 |

TABLE 11A
In vitro editing in PCH using lipid nanoparticles

| | | | Guide | | |
|---|---|---|---|---|---|
| | EC₅₀ | EC₅₀ | concentration | Mean % | |
| Guide | (nM) | SEM | (nM) | Edit | SD |
| | | | 46.56 | 80.8 | 0.84853 |
| | | | 23.28 | 83.475 | 5.48008 |
| | | | 11.64 | 80.3 | 4.59619 |
| G000502 | 2.70 | 0.17 | 5.82 | 73.825 | 2.22739 |
| | | | 2.91 | 43.75 | 7.99031 |
| | | | 1.46 | 18.65 | 5.44472 |
| | | | 0.73 | 4.8 | 1.48492 |
| | | | 0.36 | 1.525 | 0.45962 |
| | | | 46.56 | 78.6 | 4.52548 |
| | | | 23.28 | 82.55 | 3.74767 |
| | | | 11.64 | n/d | n/d |
| G017275 | 2.09 | 0.11 | 5.82 | 76.1 | 1.69706 |
| | | | 2.91 | 56.3 | 3.25269 |
| | | | 1.46 | 24.45 | 5.44472 |
| | | | 0.73 | 7.8 | 1.13137 |
| | | | 0.36 | 2.1 | 0.70711 |
| | | | 46.56 | 80.85 | 10.2531 |
| | | | 23.28 | 83.85 | 8.27315 |
| G015648 | 1.80 | 0.15 | 11.64 | 79.7 | 0.42426 |
| | | | 5.82 | 75.45 | 2.19203 |
| | | | 2.91 | 60.95 | 1.62635 |
| | | | 1.46 | 32.2 | 3.25269 |
| | | | 0.73 | 11.05 | 2.47487 |
| | | | 0.36 | 3.4 | 1.41421 |
| G015652 | 3.30 | 0.19 | 46.56 | 86.3 | 1.69706 |
| | | | 23.28 | 79.05 | 4.17193 |
| | | | 11.64 | 77.6 | 6.78823 |
| | | | 5.82 | 62.6 | 0 |
| | | | 2.91 | 37.35 | 0.91924 |
| | | | 1.46 | 13.9 | 1.69706 |
| | | | 0.73 | 3.5 | 1.41421 |
| | | | 0.36 | 1.45 | 0.3535 |
| G015653 | 3.11 | 0.18 | 46.56 | 72.05 | 3.04056 |
| | | | 23.28 | 71.6 | 9.05097 |
| | | | 11.64 | 76.35 | 3.88909 |
| | | | 5.82 | 62.55 | 0.91924 |
| | | | 2.91 | 34.2 | 2.96985 |
| | | | 1.46 | 9.85 | 1.62635 |
| | | | 0.73 | 3.55 | 0.49498 |
| | | | 0.36 | 1.1 | 0.56569 |
| G015655 | 5.59 | 0.24 | 46.56 | 74.45 | 6.15183 |
| | | | 23.28 | 77.85 | 2.33345 |
| | | | 11.64 | 67.35 | 1.3435 |
| | | | 5.82 | 41.2 | 5.9397 |
| | | | 2.91 | 11.45 | 0.07071 |
| | | | 1.46 | 3.15 | 0.3535 |
| | | | 0.73 | 1.55 | 1.06066 |
| | | | 0.36 | 0.7 | 0.28284 |
| G017281 | 1.64 | 0.11 | 46.56 | 75.05 | 5.58614 |
| | | | 23.28 | 76.35 | 5.02046 |
| | | | 11.64 | 72.3 | 6.78823 |
| | | | 5.82 | 76.2 | 5.79828 |
| | | | 2.91 | 64 | 5.09117 |
| | | | 1.46 | 32.3 | 5.79828 |
| | | | 0.73 | 9.05 | 0.49498 |
| | | | 0.36 | 2.85 | 0.49498 |
| G017282 | 3.18 | 0.24 | 46.56 | 82.2 | n/a |
| | | | 23.28 | 85.2 | n/a |
| | | | 11.64 | 78.6 | 4.66691 |
| | | | 5.82 | 61.95 | 1.06066 |
| | | | 2.91 | 37.95 | 0.6364 |
| | | | 1.46 | 19.4 | 8.34386 |
| | | | 0.73 | 3.4 | 0.42426 |
| | | | 0.36 | 1.4 | 0.14142 |
| G017283 | 5.16 | 0.23 | 46.56 | 74.8 | 5.79828 |
| | | | 23.28 | 75.75 | 6.15183 |
| | | | 11.64 | 66.9 | 3.67696 |
| | | | 5.82 | 45 | 1.41421 |
| | | | 2.91 | 14.05 | 1.76777 |
| | | | 1.46 | 3.3 | 0.42426 |
| | | | 0.73 | 2 | 0.56569 |
| | | | 0.36 | 1.3 | 0.56569 |
| G000502 | 2.44 | 0.14 | 46.56 | 79.1 | 3.53553 |
| | | | 23.28 | 86.725 | 0.67175 |
| | | | 11.64 | 83.7 | 3.67696 |
| | | | 5.82 | 74.225 | 4.77297 |
| | | | 2.91 | 50.975 | 3.14663 |
| | | | 1.46 | 19.775 | 5.05581 |
| | | | 0.73 | 5.875 | 1.6617 |
| | | | 0.36 | 1.6 | 0.49498 |
| G012401 | 1.53 | 0.08 | 46.56 | 83.25 | 1.90919 |
| | | | 23.28 | 84.8 | 0.70711 |
| | | | 11.64 | 85.05 | 6.01041 |
| | | | 5.82 | 78.4 | 6.6468 |
| | | | 2.91 | 77.2 | 3.53553 |
| | | | 1.46 | 40 | 1.13137 |
| | | | 0.73 | 15.9 | 1.55564 |
| | | | 0.36 | 5.05 | 0.6364 |
| G009978 | 2.15 | 0.08 | 46.56 | 81.25 | 1.3435 |
| | | | 23.28 | 83.85 | 0.77782 |
| | | | 11.64 | 81.85 | 2.47487 |
| | | | 5.82 | 74.55 | 4.59619 |
| | | | 2.91 | 53.9 | 1.83848 |
| | | | 1.46 | 26.25 | 0.07071 |
| | | | 0.73 | 7 | 0.84853 |
| | | | 0.36 | 2.35 | 0.07071 |
| G015642 | 1.77 | 0.07 | 46.56 | 84.1 | 1.69706 |
| | | | 23.28 | 82.6 | 2.68701 |
| | | | 11.64 | 83.35 | 3.18198 |
| | | | 5.82 | 76.2 | 3.81838 |
| | | | 2.91 | 63.2 | 0.98995 |
| | | | 1.46 | 33.8 | 1.55564 |
| | | | 0.73 | 12.1 | 0.98995 |
| | | | 0.36 | 4.2 | 0 |
| G017276 | 1.37 | 0.11 | 46.56 | 77.9 | 3.67696 |
| | | | 23.28 | 83.1 | 1.69706 |
| | | | 11.64 | 80.1 | 5.37401 |
| | | | 5.82 | 75.4 | 3.67696 |
| | | | 2.91 | 65.6 | 6.92965 |
| | | | 1.46 | 44.8 | 0.98995 |
| | | | 0.73 | 13.7 | 1.13137 |
| | | | 0.36 | 4.45 | 0.91924 |
| G017277 | 1.50 | 0.09 | 46.56 | 84.1 | 3.9598 |
| | | | 23.28 | 83.2 | 2.96985 |
| | | | 11.64 | 81.8 | 5.09117 |
| | | | 5.82 | 78.6 | 2.40416 |
| | | | 2.91 | 65.45 | 1.20208 |
| | | | 1.46 | 40.8 | 2.68701 |
| | | | 0.73 | 15.1 | 1.69706 |
| | | | 0.36 | 4.45 | 0.07071 |
| G017278 | 1.50 | 0.08 | 46.56 | 85.35 | 0.21213 |
| | | | 23.28 | 83.65 | 1.06066 |
| | | | 11.64 | 83.15 | 0.21213 |
| | | | 5.82 | 78.05 | 2.33345 |
| | | | 2.91 | 67.7 | 0.70711 |
| | | | 1.46 | 41.35 | 7.42462 |
| | | | 0.73 | 12.65 | 2.33345 |
| | | | 0.36 | 3.95 | 0.91924 |
| G017280 | 1.60 | 0.07 | 46.56 | 81.85 | 0.07071 |
| | | | 23.28 | 86.15 | 2.6163 |
| | | | 11.64 | 83.75 | 1.20208 |
| | | | 5.82 | 78.7 | 3.39411 |
| | | | 2.91 | 66.65 | 0.6364 |
| | | | 1.46 | 38.65 | 2.33345 |
| | | | 0.73 | 16.45 | 1.20208 |
| | | | 0.36 | 5.6 | 0.14142 |

[1427] Lipid nanoparticle (LNP) formulations of sgRNAs were tested on PMH and PCH in dose response assays as described in Example 1 and Example 2 with some protocol modifications. Specifically, PMH (Gibco, Lot #839) and PCH (InVitro ADMET Laboratories, Lot #10361011) were prepared using hepatocyte medium with supplements (Invitrogen, William's E (Gibco, Cat. A1217601), plating supplements (Cocktail A and Dexamethasone) (Gibco, Cat. A15563), plating Supplements (FBS) (Gibco, Cat. A13450), maintenance supplement (Gibco, Cat. A15564), respectively. PCH were counted and plated at a density of 30,000 cells/well. PMH and PCH were incubated at 37° C., 5% CO2 for 24 hours prior to treatment with LNPs. LNPs were prepared using the process as described above with an alternative mixing technology. Post-incubation the LNPs were added to the mouse or cynomolgus hepatocytes in an 8 point 3-fold dose response curve starting at 300 ng Cas9 mRNA. The cells were lysed 72 hours post-treatment for NGS analysis as described in Example 1. Samples included in the assay were run in duplicate or triplicate and the control with 6 replicates. G000502 was used as a benchmark in this study. EC₅₀ values and mean editing results for PMH are shown in Table 11B and plotted as dose response curves in FIGS. 5C and 5D. EC₅₀ values and mean editing results for PCH are shown in Table 11C and plotted as dose response curves in FIGS. 5E and 5F.

TABLE 11B
In vitro editing in PMH using lipid nanoparticles

| | | | Guide | | |
|---|---|---|---|---|---|
| | | EC₅₀ | concentration | Mean % | |
| Guide | EC₅₀ | SEM | (nM) | Edit | SD |
| G012401 | 0.18 | 0.01 | 46.56 | 97.5 | 1.1 |
| | | | 15.52 | 98.3 | 0.5 |
| | | | 5.17 | 98.0 | 1.0 |
| | | | 1.72 | 96.1 | 0.2 |
| | | | 0.57 | 83.4 | 1.4 |
| | | | 0.19 | 51.5 | 3.8 |
| | | | 0.06 | 17.6 | 3.1 |
| | | | 0.02 | 5.1 | 1.7 |
| G019877 | 0.638 | 0.012 | 46.56 | 97.2 | 0.2 |
| | | | 15.52 | 98.2 | 0.3 |
| | | | 5.17 | 97.1 | 0.5 |
| | | | 1.72 | 85.2 | 2.4 |
| | | | 0.57 | 44.6 | 0.5 |
| | | | 0.19 | 11.5 | 2.5 |
| | | | 0.06 | 2.9 | 1.0 |
| | | | 0.02 | 0.5 | 0.1 |
| G020350 | 0.225 | 0.006 | 46.56 | 94.3 | 0.6 |
| | | | 15.52 | 96.6 | 0.4 |
| | | | 5.17 | 96.7 | 1.1 |
| | | | 1.72 | 94.9 | 0.4 |
| | | | 0.57 | 79.7 | 1.3 |
| | | | 0.19 | 42.3 | 1.2 |
| | | | 0.06 | 13.3 | 0.9 |
| | | | 0.02 | 2.8 | 0.3 |
| G020024 | 0.158 | 0.006 | 46.56 | 96.0 | 2.0 |
| | | | 15.52 | 96.6 | 0.1 |
| | | | 5.17 | 97.1 | 0.7 |
| | | | 1.72 | 95.7 | 2.5 |
| | | | 0.57 | 87.2 | 0.4 |
| | | | 0.19 | 56.6 | 2.3 |
| | | | 0.06 | 19.3 | 3.5 |
| | | | 0.02 | 4.8 | 0.9 |
| G020025 | 0.278 | 0.009 | 46.56 | 95.4 | 0.4 |
| | | | 15.52 | 96.8 | 1.1 |
| | | | 5.17 | 95.0 | 0.3 |
| | | | 1.72 | 94.7 | 2.2 |
| | | | 0.57 | 76.4 | 1.0 |
| | | | 0.19 | 33.9 | 1.8 |
| | | | 0.06 | 10.9 | 1.6 |
| | | | 0.02 | 2.4 | 0.7 |
| G017276 | 0.297 | 0.011 | 46.56 | 96.9 | 0.9 |
| | | | 15.52 | 98.1 | 0.6 |
| | | | 5.17 | 97.2 | 0.7 |
| | | | 1.72 | 91.9 | 1.4 |
| | | | 0.57 | 70.5 | 3.3 |
| | | | 0.19 | 34.1 | 3.8 |
| | | | 0.06 | 8.1 | 1.2 |
| | | | 0.02 | 2.1 | 1.3 |
| G020353 | 0.322 | 0.008 | 46.56 | 96.9 | 0.9 |
| | | | 15.52 | 98.1 | 0.3 |
| | | | 5.17 | 97.8 | 0.4 |
| | | | 1.72 | 93.6 | 1.6 |
| | | | 0.57 | 72.0 | 1.6 |
| | | | 0.19 | 28.7 | 3.9 |
| | | | 0.06 | 6.8 | 0.3 |
| | | | 0.02 | 1.4 | 0.0 |
| G020027 | 0.338 | 0.009 | 46.56 | 94.5 | 2.5 |
| | | | 15.52 | 96.1 | 0.6 |
| | | | 5.17 | 95.7 | 1.3 |
| | | | 1.72 | 92.2 | 1.8 |
| | | | 0.57 | 69.3 | 0.5 |
| | | | 0.19 | 26.7 | 0.8 |
| | | | 0.06 | 6.0 | 1.8 |
| | | | 0.02 | 2.0 | 0.7 |
| G000502 | 0.448 | 0.013 | 46.56 | 97.0 | 1.1 |
| | | | 15.52 | 96.9 | 2.7 |
| | | | 5.17 | 95.7 | 1.2 |
| | | | 1.72 | 92.6 | 1.9 |
| | | | 0.57 | 66.0 | 2.5 |
| | | | 0.19 | 27.2 | 4.2 |
| | | | 0.06 | 7.4 | 1.7 |
| | | | 0.02 | 1.9 | 1.0 |
| G020028 | 0.394 | 0.025 | 46.56 | 88.4 | 0.4 |
| | | | 15.52 | 88.3 | 0.4 |
| | | | 5.17 | 89.8 | 1.7 |
| | | | 1.72 | 84.6 | 5.1 |
| | | | 0.57 | 55.4 | 3.0 |
| | | | 0.19 | 24.4 | 1.2 |
| | | | 0.06 | 6.1 | 1.3 |
| | | | 0.02 | 0.7 | 0.1 |
| G020349 | 0.449 | 0.015 | 46.56 | 91.4 | 0.3 |
| | | | 15.52 | 94.3 | 0.8 |
| | | | 5.17 | 93.8 | 0.3 |
| | | | 1.72 | 83.8 | 2.6 |
| | | | 0.57 | 55.7 | 3.1 |
| | | | 0.19 | 20.3 | 1.2 |
| | | | 0.06 | 4.7 | 0.4 |
| | | | 0.02 | 1.0 | 0.3 |
| G020022 | 0.497 | 0.011 | 46.56 | 97.4 | 0.4 |
| | | | 15.52 | 97.9 | 0.5 |
| | | | 5.17 | 97.0 | 1.1 |
| | | | 1.72 | 88.3 | 1.1 |
| | | | 0.57 | 55.3 | 3.3 |
| | | | 0.19 | 16.9 | 1.3 |
| | | | 0.06 | 4.5 | 1.2 |
| | | | 0.02 | 0.7 | 0.3 |
| G020352 | 0.596 | 0.014 | 46.56 | 93.0 | 0.9 |
| | | | 15.52 | 96.2 | 0.6 |
| | | | 5.17 | 95.9 | 0.9 |
| | | | 1.72 | 84.5 | 1.1 |
| | | | 0.57 | 46.2 | 1.6 |
| | | | 0.19 | 12.3 | 1.3 |
| | | | 0.06 | 2.8 | 1.0 |
| | | | 0.02 | 0.5 | 0.2 |
| G020029 | 0.597 | 0.023 | 46.56 | 88.1 | 4.9 |
| | | | 15.52 | 91.6 | 2.1 |
| | | | 5.17 | 91.7 | 1.6 |
| | | | 1.72 | 83.2 | 1.3 |
| | | | 0.57 | 44.0 | 0.5 |
| | | | 0.19 | 10.6 | 1.4 |
| | | | 0.06 | 2.6 | 0.1 |
| | | | 0.02 | 1.2 | 0.4 |
| G020351 | 0.619 | 0.026 | 46.56 | 87.9 | 1.4 |
| | | | 15.52 | 95.0 | 0.4 |
| | | | 5.17 | 95.7 | 1.3 |
| | | | 1.72 | 84.6 | 1.8 |
| | | | 0.57 | 42.7 | 1.3 |
| | | | 0.19 | 12.1 | 1.7 |
| | | | 0.06 | 2.0 | 0.4 |
| | | | 0.02 | 0.5 | 0.4 |
| G020023 | 0.652 | 0.027 | 46.56 | 97.0 | 0.6 |
| | | | 15.52 | 98.4 | 0.5 |
| | | | 5.17 | 97.1 | 0.8 |
| | | | 1.72 | 83.8 | 2.8 |
| | | | 0.57 | 43.5 | 5.8 |
| | | | 0.19 | 12.0 | 5.4 |
| | | | 0.06 | 1.8 | 0.6 |
| | | | 0.02 | 0.6 | 0.5 |
| G020026 | 0.669 | 0.019 | 46.56 | 89.0 | 1.3 |
| | | | 15.52 | 91.9 | 2.2 |
| | | | 5.17 | 89.8 | 0.1 |
| | | | 1.72 | 78.3 | 0.4 |
| | | | 0.57 | 39.3 | 2.2 |
| | | | 0.19 | 10.7 | 0.1 |
| | | | 0.06 | 2.4 | 0.1 |
| | | | 0.02 | 1.0 | 0.4 |
| G020030 | 3.359 | 0.27 | 46.56 | 68.4 | 1.1 |
| | | | 15.52 | 79.9 | 4.1 |
| | | | 5.17 | 54.9 | 2.1 |
| | | | 1.72 | 12.7 | 1.8 |
| | | | 0.57 | 1.2 | 0.1 |
| | | | 0.19 | 0.4 | 0.1 |
| | | | 0.06 | 0.4 | 0.1 |
| | | | 0.02 | 0.3 | n/d |
| G012401 | 0.1 | 0.02 | 46.6 | 90.0 | 3.7 |
| | | | 15.5 | 84.5 | 7.3 |
| | | | 5.2 | 90.4 | 3.0 |
| | | | 1.7 | 86.7 | 6.7 |
| | | | 0.6 | 78.9 | 2.4 |
| | | | 0.2 | 53.4 | 2.4 |
| | | | 0.1 | 22.7 | 0.6 |
| | | | 0.0 | 4.9 | 0.2 |
| G019877 | 0.4 | 0.05 | 46.6 | 80.0 | 12.9 |
| | | | 15.5 | 85.7 | 3.0 |
| | | | 5.2 | 87.9 | 4.0 |
| | | | 1.7 | 78.4 | 8.2 |
| | | | 0.6 | 56.8 | 10.4 |
| | | | 0.2 | 23.4 | 5.2 |
| | | | 0.1 | 5.6 | 0.7 |
| | | | 0.0 | 1.0 | 0.2 |
| G020350 | 0.2 | 0.03 | 46.6 | 79.5 | 3.0 |
| | | | 15.5 | 82.5 | 2.3 |
| | | | 5.2 | 80.3 | 16.1 |
| | | | 1.7 | 81.4 | 12.2 |
| | | | 0.6 | 73.7 | 6.2 |
| | | | 0.2 | 47.0 | 7.8 |
| | | | 0.1 | 19.6 | 3.1 |
| | | | 0.0 | 4.1 | 1.7 |
| G020024 | 0.1 | 0.01 | 46.6 | 91.3 | 0.3 |
| | | | 15.5 | 88.4 | 0.2 |
| | | | 5.2 | 90.7 | 1.6 |
| | | | 1.7 | 87.1 | 0.6 |
| | | | 0.6 | 77.6 | 1.9 |
| | | | 0.2 | 54.9 | 1.9 |
| | | | 0.1 | 27.8 | 0.4 |
| | | | 0.0 | 8.9 | 0.5 |
| G020025 | 0.2 | 0.01 | 46.6 | 89.9 | 0.1 |
| | | | 15.5 | 89.2 | 3.5 |
| | | | 5.2 | 87.4 | 0.6 |
| | | | 1.7 | 86.0 | 3.5 |
| | | | 0.6 | 70.5 | 1.6 |
| | | | 0.2 | 39.9 | 1.8 |
| | | | 0.1 | 14.3 | 1.6 |
| | | | 0.0 | 3.3 | 0.8 |
| G017276 | 0.3 | 0.01 | 46.6 | 89.3 | 1.9 |
| | | | 15.5 | 90.5 | 1.5 |
| | | | 5.2 | 88.9 | 1.0 |
| | | | 1.7 | 84.8 | 1.3 |
| | | | 0.6 | 62.1 | 0.3 |
| | | | 0.2 | 31.5 | 0.6 |
| | | | 0.1 | 2.4 | 2.0 |
| | | | 0.0 | 1.9 | 0.4 |
| G020353 | 0.2 | 0.05 | 46.6 | 83.2 | 5.7 |
| | | | 15.5 | 83.1 | 10.7 |
| | | | 5.2 | 87.6 | 6.2 |
| | | | 1.7 | 83.1 | 8.3 |
| | | | 0.6 | 68.6 | 13.9 |
| | | | 0.2 | 36.3 | 16.5 |
| | | | 0.1 | 10.3 | n/d |
| | | | 0.0 | 2.6 | 0.4 |
| G020027 | 0.2 | 0.02 | 46.6 | 92.3 | 2.1 |
| | | | 15.5 | 89.3 | 2.1 |
| | | | 5.2 | 91.4 | 1.2 |
| | | | 1.7 | 84.9 | 0.9 |
| | | | 0.6 | 68.2 | 4.3 |
| | | | 0.2 | 39.5 | 1.6 |
| | | | 0.1 | 14.4 | 0.3 |
| | | | 0.0 | 3.8 | 0.1 |
| G000502 | 0.3 | 0.03 | 46.6 | 84.8 | 8.3 |
| | | | 15.5 | 83.7 | 8.4 |
| | | | 5.2 | 84.5 | 7.1 |
| | | | 1.7 | 75.5 | 6.2 |
| | | | 0.6 | 57.5 | 6.3 |
| | | | 0.2 | 26.7 | 4.7 |
| | | | 0.1 | 8.0 | 1.7 |
| | | | 0.0 | 2.0 | 0.5 |
| G020028 | 0.4 | 0.02 | 46.6 | 87.5 | 1.5 |
| | | | 15.5 | 88.2 | 3.6 |
| | | | 5.2 | 85.8 | 3.4 |
| | | | 1.7 | 78.2 | 0.9 |
| | | | 0.6 | 56.8 | 0.1 |
| | | | 0.2 | 27.8 | 1.8 |
| | | | 0.1 | 7.8 | 0.1 |
| | | | 0.0 | 1.9 | 0.1 |
| G020349 | 0.4 | 0.16 | 46.6 | 85.3 | 8.6 |
| | | | 15.5 | 84.8 | 7.7 |
| | | | 5.2 | 91.1 | 2.1 |
| | | | 1.7 | 70.5 | 20.5 |
| | | | 0.6 | 50.4 | 22.8 |
| | | | 0.2 | 30.3 | 12.4 |
| | | | 0.1 | 8.5 | 2.2 |
| | | | 0.0 | 2.0 | 1.1 |
| G020022 | 0.3 | 0.05 | 46.6 | 77.9 | 9.1 |
| | | | 15.5 | 91.3 | 1.0 |
| | | | 5.2 | 81.9 | 10.6 |
| | | | 1.7 | 79.3 | 9.1 |
| | | | 0.6 | 62.4 | 8.6 |
| | | | 0.2 | 29.2 | 8.5 |
| | | | 0.1 | 7.0 | 2.1 |
| | | | 0.0 | 1.7 | 1.0 |
| G020352 | 0.3 | 0.05 | 46.6 | 74.7 | 3.9 |
| | | | 15.5 | 78.2 | 3.8 |
| | | | 5.2 | 81.9 | 12.9 |
| | | | 1.7 | 82.7 | 5.1 |
| | | | 0.6 | 57.1 | 9.3 |
| | | | 0.2 | 24.7 | 4.5 |
| | | | 0.1 | 9.6 | 1.8 |
| | | | 0.0 | 1.7 | 0.2 |
| G020029 | 0.5 | 0.05 | 46.6 | 88.3 | 4.1 |
| | | | 15.5 | 84.0 | 7.1 |
| | | | 5.2 | 84.9 | 0.6 |
| | | | 1.7 | 70.9 | 5.9 |
| | | | 0.6 | 44.8 | 3.2 |
| | | | 0.2 | 18.5 | 0.2 |
| | | | 0.1 | 4.6 | 0.7 |
| | | | 0.0 | 1.4 | 0.8 |
| G020351 | 0.4 | 0.07 | 46.6 | 71.9 | 8.2 |
| | | | 15.5 | 78.6 | 10.4 |
| | | | 5.2 | 89.0 | 4.2 |
| | | | 1.7 | 77.8 | 6.4 |
| | | | 0.6 | 51.8 | 10.3 |
| | | | 0.2 | 21.3 | 6.5 |
| | | | 0.1 | 4.1 | 1.8 |
| | | | 0.0 | 1.3 | 0.0 |
| G020023 | 0.4 | 0.08 | 46.6 | 81.8 | 11.8 |
| | | | 15.5 | 82.3 | 14.1 |
| | | | 5.2 | 86.6 | 8.7 |
| | | | 1.7 | 72.2 | 11.1 |
| | | | 0.6 | 53.4 | 11.9 |
| | | | 0.2 | 20.5 | 6.7 |
| | | | 0.1 | 5.2 | 0.1 |
| | | | 0.0 | 1.1 | 0.6 |
| G020026 | 0.5 | 0.02 | 46.6 | 84.5 | 1.9 |
| | | | 15.5 | 86.3 | 1.1 |
| | | | 5.2 | 84.7 | 1.1 |
| | | | 1.7 | 74.6 | 2.5 |
| | | | 0.6 | 47.1 | 2.7 |
| | | | 0.2 | 17.8 | 0.8 |
| | | | 0.1 | 4.6 | 0.5 |
| | | | 0.0 | 0.9 | 0.1 |
| G020030 | 2.8 | 0.52 | 46.6 | 62.1 | 7.8 |
| | | | 15.5 | 81.6 | 1.8 |
| | | | 5.2 | 52.2 | 5.7 |
| | | | 1.7 | 22.1 | 2.3 |
| | | | 0.6 | 8.9 | 4.3 |
| | | | 0.2 | 2.4 | 1.8 |
| | | | 0.1 | 0.5 | 0.3 |
| | | | 0.0 | 0.3 | 0.0 |

### Example 5—In Vivo Editing in Mouse Liver

[1428] Selected guide designs were tested for editing efficiency in vivo. CD-1 female mice, ranging 6-10 weeks of age were used in each study involving mice. Animals were weighed pre-dose for dosing calculations. LNPs were dosed via the lateral tail vein in a volume of 0.2 mL per animal (approximately 10 mL per kilogram body weight). The animals were observed at approximately 6 hours post dose for adverse effects. Body weight was measured at twenty-four hours post-administration, and animals were euthanized at various time points by exsanguination under isoflurane anesthesia. Blood was collected via cardiac puncture into serum separator tubes or into tubes containing buffered sodium citrate for plasma as described herein. For studies involving in vivo editing, liver tissue was collected from the left median lobe from each animal for DNA extraction and analysis.

[1429] For the in vivo studies, genomic DNA was extracted from 10 mg of tissue using a bead-based extraction kit, e.g. the Zymo Quick-DNA 96 kit (Zymo Research, Cat. #D3010) according to the manufacturer's protocol, which includes homogenizing the tissue in lysis buffer (approximately 400 μL/10 mg tissue). All DNA samples were normalized to 100 ng/μL concentration for PCR and subsequent NGS analysis, as described in Example 1.

[1430] LNPs used in all in mouse studies were generated as described in Example 4. Deviations from the protocol are noted in the respective Example.

[1431] Transthyretin (TTR) ELISA Analysis Used in Animal Studies

[1432] Blood was collected, and the serum was isolated as indicated. The total TTR serum levels were determined using a Mouse Prealbumin (Transthyretin) ELISA Kit (Aviva Systems Biology, Cat. OKIA00111); rat TTR serum levels were measured using a rat specific ELISA kit (Aviva Systems Biology catalog number OKIA00159). Kit reagents and standards were prepared according to the manufacturer's protocol. Mouse or rat serum was diluted to a final dilution of 10,000-fold with 1× assay diluent. This was done by carrying out two sequential 50-fold dilutions resulting in a 2500-fold dilution. A final 4-fold dilution step was carried out for a total sample dilution of 10,000-fold. Both standard curve dilutions (100 μL each) and diluted serum samples were added to each well of the ELISA plate pre-coated with capture antibody. The plate was incubated at room temperature for 30 minutes before washing. Enzyme-antibody conjugate (100 μL per well) was added for a 20-minute incubation. Unbound antibody conjugate was removed and the plate was washed again before the addition of the chromogenic substrate solution. The plate was incubated for 10 minutes before adding 100 μL of the stop solution, e.g., sulfuric acid (approximately 0.3 M). The plate was read on a SpectraMax M5 or Clariostar plate reader at an absorbance of 450 nm. Serum TTR levels were calculated by SoftMax Pro software ver. 6.4.2 or Mars software ver. 3.31 using a four parameter logistic curve fit off the standard curve. Final serum values were adjusted for the assay dilution. Percent knockdown (% KD) values were determined relative to controls, which generally were animals sham-treated with vehicle (transport and storage solution or TSS) unless otherwise indicated.

[1433] Table 12 shows the editing efficiency and TTR protein levels, respectively, for LNPs containing the sgRNAs indicated (See Table 1A for sgRNA nucleotide sequences) which all target the same sequence in the TTR gene. Guide G000502 and guide G012401, for example, served as controls. The LNPs were made as described in Example 4. The data shown in FIGS. 6A-B and Table 12 are from female CD-1 mice (n=3, 4, or 5) administered 0.1 mg/kg and 0.3 mg/kg of total RNA.

TABLE 12
Liver Editing and Serum TTR

| | Dose | | | | Serum TTR | | |
|---|---|---|---|---|---|---|---|
| Guide | (mg/kg) | % Editing | SD | n | (μg/ml) | SD | n |
| Vehicle | TSS | 0.1 | 0.0 | 4 | 713 | 282.8 | 5 |
| G000502 | 0.3 | 65.8 | 2.5 | 5 | 141 | 99.3 | 5 |
| G000502 | 0.1 | 47.6 | 1.3 | 5 | 236 | 83.2 | 5 |
| G012401 | 0.3 | 60.3 | 7.3 | 5 | 319 | 193.1 | 4 |
| G012401 | 0.1 | 41.8 | 16.7 | 5 | 330 | 119.3 | 5 |
| G017275 | 0.3 | 47.6 | 5.6 | 5 | 304 | 87.9 | 5 |
| G017275 | 0.1 | 27.9 | 8.0 | 5 | 394 | 165.7 | 5 |
| G015642 | 0.3 | 62.3 | 4.0 | 5 | 138 | 40.4 | 5 |
| G015642 | 0.1 | 37.5 | 14.8 | 5 | 367 | 181.2 | 5 |
| G015648 | 0.3 | 62.3 | 4.0 | 5 | 183 | 121.2 | 3 |
| G015648 | 0.1 | 28.5 | 9.8 | 5 | 534 | 55.5 | 5 |
| G015652 | 0.3 | 37.9 | 7.8 | 5 | 383 | 58.3 | 5 |
| G015652 | 0.1 | 21.9 | 10.9 | 5 | 456 | 79.0 | 5 |
| G015653 | 0.3 | 19.0 | 3.3 | 5 | 586 | 90.1 | 5 |
| G015653 | 0.1 | 9.1 | 4.3 | 5 | 507 | 139.4 | 5 |
| G017280 | 0.1 | 43.1 | 3.9 | 5 | 339 | 83.8 | 4 |

[1434] Table 13 shows the editing efficiency and TTR protein levels, respectively, for LNPs containing the sgRNAs indicated (See Table 1A for sgRNA nucleotide sequences) which all target the same sequence in the TTR gene. Guide G000502 and guide G012401, for example, served as controls. The LNPs were made as described in Example 4. The data shown in FIGS. 7A-B and Table 13 are from CD-1 female mice (n=5) administered 0.1 mg/kg and 0.3 mg/kg of total RNA.

TABLE 13
Liver Editing and Serum TTR

| | Dose | | | | Serum TTR | | |
|---|---|---|---|---|---|---|---|
| Guide | (mpk) | % Editing | SD | n | μg/ml | SD | n |
| TSS | TSS | 0.1 | 0.1 | 5 | 908 | 231.6 | 5 |
| G000502 | 0.3 | 71.1 | 2.5 | 5 | 29 | 18.6 | 5 |
| G000502 | 0.1 | 49.2 | 8.4 | 5 | 303 | 112.9 | 5 |
| G012401 | 0.3 | 66.7 | 2.9 | 5 | 68 | 17.3 | 5 |
| G012401 | 0.1 | 34.7 | 4.7 | 5 | 461 | 122.3 | 5 |
| G017281 | 0.3 | 56.9 | 9.8 | 5 | 165 | 112.4 | 5 |
| G017281 | 0.1 | 24.4 | 6.0 | 5 | 570 | 172.6 | 5 |
| G017282 | 0.3 | 55.7 | 8.8 | 5 | 175 | 100.2 | 5 |
| G017282 | 0.1 | 22.7 | 4.4 | 5 | 566 | 131.2 | 5 |
| G017276 | 0.3 | 71.3 | 3.1 | 5 | 26 | 25.8 | 5 |
| G017276 | 0.1 | 61.1 | 6.1 | 5 | 130 | 52.0 | 4 |
| G017277 | 0.3 | 67.8 | 4.3 | 5 | 38 | 15.2 | 5 |
| G017277 | 0.1 | 53.0 | 7.4 | 5 | 264 | 112.3 | 5 |
| G017278 | 0.3 | 70.6 | 1.7 | 5 | 41 | 26.7 | 5 |
| G017278 | 0.1 | 38.7 | 5.3 | 5 | 372 | 106.7 | 5 |
| G017279 | 0.3 | 68.6 | 1.4 | 5 | 45 | 14.6 | 5 |
| G017279 | 0.1 | 44.8 | 2.6 | 5 | 238 | 45.1 | 5 |

[1435] Table 14 shows the editing efficiency and TTR protein levels, respectively, for LNPs containing the sgRNAs indicated (See Table 1A for sgRNA nucleotide sequences) which all target the same sequence in the TTR gene. LNPs without guide, noted as TSS, were included in the experiment as a relative control. The data shown in FIGS. 8A-B and Table 14 are from CD-1 female mice (n=5) administered 0.03 mg/kg, 0.1 mg/kg, and 0.3 mg/kg of total RNA. Liver editing and serum protein levels were measured in the mice as described above.

TABLE 14
Liver Editing and Serum TTR

| | Dose | | | | Serum TTR | | |
|---|---|---|---|---|---|---|---|
| Guide | (mpk) | % Editing | SD | n | (ug/ml) | SD | n |
| TSS | TSS | 0.2 | 0.1 | 5 | 1106.4 | 17.5 | 5 |
| G000502 | 0.03 | 12.0 | 4.1 | 5 | 851.1 | 10.4 | 5 |
| G012401 | 0.03 | 9.1 | 2.5 | 5 | 913.5 | 6.5 | 5 |
| G017276 | 0.03 | 22.1 | 1.7 | 5 | 632.0 | 1.7 | 5 |
| G017279 | 0.03 | 11.0 | 3.4 | 5 | 711.5 | 11.6 | 5 |
| G017280 | 0.03 | 16.9 | 2.9 | 5 | 667.3 | 16.3 | 5 |
| G000502 | 0.1 | 38.6 | 1.1 | 5 | 478.9 | 3.0 | 5 |
| G012401 | 0.1 | 27.4 | 4.4 | 5 | 697.7 | 3.9 | 5 |
| G017276 | 0.1 | 50.4 | 11.3 | 5 | 233.9 | 10.9 | 5 |
| G017279 | 0.1 | 42.9 | 1.0 | 5 | 294.4 | 0.7 | 5 |
| G017280 | 0.1 | 32.3 | 1.8 | 5 | 427.0 | 12.2 | 5 |
| G000502 | 0.3 | 65.3 | 3.6 | 5 | 51.7 | 4.2 | 5 |
| G012401 | 0.3 | 56.9 | 2.8 | 5 | 143.8 | 2.8 | 5 |
| G017276 | 0.3 | 67.1 | 5.9 | 5 | 40.1 | 7.5 | 5 |
| G017279 | 0.3 | 63.1 | 6.6 | 5 | 77.3 | 7.5 | 5 |
| G017280 | 0.3 | 60.8 | 3.2 | 5 | 98.4 | 5.8 | 5 |

[1436] Table 15 shows the editing efficiency and TTR protein levels, respectively, for LNPs containing the sgRNAs indicated (See Table 1A for sgRNA nucleotide sequences) which all target the same sequence in the TTR gene. LNPs without guide, noted as TSS, were included in the experiment as a relative control. The data shown in Table 15 and FIGS. 9A-B are from CD-1 female mice (n=5) administered 0.03 mg/kg of total RNA. Liver editing and serum protein levels were measured in the mice as described above except animals were observed 24 hours post dose.

TABLE 15
Liver Editing and Serum TTR

| | | | | Serum TTR | | |
|---|---|---|---|---|---|---|
| Guide | % Editing | SD | n | (μg/ml) | SD | n |
| TSS | 0.1 | 0.0 | 5 | 1050.1 | 192.5 | 5 |
| G012401 | 4.7 | 1.3 | 5 | 1201.4 | 180.2 | 5 |
| G017276 | 5.7 | 1.3 | 5 | 1267.2 | 110.3 | 5 |
| G020349 | 11.4 | 6.4 | 5 | 1616.9 | 398.1 | 5 |
| G020350 | 19.0 | 3.4 | 5 | 1333.5 | 422.7 | 5 |
| G020351 | 1.0 | 0.5 | 5 | 1475.8 | 230.7 | 5 |
| G020352 | 1.6 | 0.9 | 5 | 1324.0 | 422.0 | 5 |
| G020353 | 5.1 | 1.6 | 5 | 990.9 | 153.1 | 5 |
| G019877 | 1.9 | 1.0 | 5 | 1168.1 | 236.7 | 5 |
| G020022 | 3.0 | 1.0 | 5 | 1147.2 | 304.4 | 5 |
| G020023 | 1.8 | 0.8 | 5 | 1021.9 | 139.7 | 5 |
| G020024 | 12.1 | 9.9 | 5 | 947.5 | 177.5 | 5 |
| G020025 | 3.1 | 2.3 | 5 | 998.4 | 247.0 | 5 |
| G020027 | 4.1 | 2.0 | 5 | 1193.2 | 226.6 | 5 |

[1437] Table 16 shows the editing efficiency and TTR protein levels, respectively, for LNPs containing the sgRNAs indicated (See Table 1A for sgRNA nucleotide sequences) which all target the same sequence in the TTR gene. LNPs without guide, noted as TSS, were included in the experiment as a relative control and G000502 as a benchmark in this study. The data shown in FIGS. 10A-B and Table 16 are from CD-1 female mice (n=3, 4, or 5) administered 0.03 mg/kg and 0.1 mg/kg of total RNA. Liver editing and serum protein levels were measured in the mice as described above except animals were observed 24 hours post dose.

TABLE 16
Liver Editing and Serum TTR

| Guide | Dose | | | | Serum TTR | | |
|---|---|---|---|---|---|---|---|
| ID | (mpk) | % Editing | SD | n | (μg/ml) | SD | n |
| TSS | N/A | 0.1 | 0.04 | 5 | 667.5 | 115.6 | 5 |
| G017276 | 0.03 | 26.6 | 6.2 | 5 | 468.1 | 69.3 | 5 |
| G017276 | 0.03 | 26.0 | 6.3 | 5 | 544.8 | 52.4 | 5 |
| G012401 | 0.03 | 11.4 | 4.5 | 5 | 574.9 | 72.2 | 5 |
| G020349 | 0.03 | 23.5 | 12.3 | 5 | 552.11 | 205.3 | 5 |
| G020350 | 0.03 | 26.6 | 8.0 | 5 | 482.4 | 89.8 | 5 |
| G020024 | 0.03 | 11.4 | 7.7 | 5 | 633.3 | 99.4 | 5 |
| G020025 | 0.03 | 9.7 | 3.5 | 5 | 616.9 | 99.4 | 5 |
| G020028 | 0.03 | 6.5 | 1.6 | 5 | 651.1 | 49.8 | 5 |
| G017276 | 0.1 | 53.4 | 7.1 | 5 | 199.4 | 74.4 | 5 |
| G017276 | 0.1 | 59.1 | 7.1 | 5 | 123.6 | 29.2 | 5 |
| G012401 | 0.1 | 32.3 | 3.0 | 5 | 429.8 | 93.5 | 5 |
| G020349 | 0.1 | 58.2 | 6.6 | 4 | 159.2 | 38.8 | 3 |
| G020350 | 0.1 | 57.6 | 5.9 | 5 | 147.0 | 54.0 | 5 |
| G020024 | 0.1 | 38.8 | 10.4 | 4 | 382.0 | 165.8 | 4 |
| G020025 | 0.1 | 39.7 | 7 | 4 | 474.8 | 167.3 | 4 |
| G020028 | 0.1 | 31.1 | 5.3 | 5 | 465.9 | 37.5 | 5 |

### Example 6. In Vivo Editing in Rat Liver

[1438] Selected guide designs were further tested in rats. Sprague Dawley female rats from Charles River, ranging 6-8 weeks of age, were used in each study involving rats. LNPs were dosed via the lateral tail vein injection in a volume of 0.3-0.4 mL per animal (approximately 10 mL per kilogram body weight) or 0.35 mL per animal. The animals were observed post dose for adverse effects. Body weight was measured at twenty-four hours post-administration and animals euthanized post dose via exsanguination under isoflurane anesthesia or CO₂ asphyxiation. Blood was collected via cardiac puncture into serum separator tubes (Geriner Bio One, Catalog #450472). For studies involving in vivo editing, liver tissue was collected from the left lateral lobe from each animal. Genomic DNA was isolated and processed as described in Example 5. All DNA samples were prepared for PCR and subsequent NGS analysis as described in Example 1.

[1439] Editing efficiency in the liver and protein serum TTR levels were evaluated for each rat sample as described in Example 6. The results shown in each of the following study tables denote the sgRNA contained within each LNP (See Table 1A for sgRNA nucleotide sequences) which all target the same sequence in the TTR gene. The LNPs were made as described in Example 5. Deviations from the protocol are noted in the respective Example below.

[1440] The data shown in FIGS. 11A-11B and Table 17 are from Sprague Dawley female rats (n=5 per group) administered 0.1 mg/kg of total RNA and euthanized at 7 days post dose. Samples were processed as described above.

TABLE 17
Liver Editing and Serum TTR

| | | | | Serum TTR | | | |
|---|---|---|---|---|---|---|---|
| Guide | % Editing | SD | n | (μg/ml) | SD | N | % TTR |
| TSS | 0.1 | 0 | 5 | 1553.3 | 259.4 | 5 | 100 |
| G000534 | 43.1 | 6.8 | 5 | 493.4 | 191.9 | 5 | 31.7 |
| G000694 | 30.9 | 5.4 | 5 | 867.8 | 190.2 | 5 | 55.9 |
| G018631 | 56.8 | 7.4 | 5 | 212.4 | 80.7 | 5 | 13.7 |
| G018632 | 46.5 | 5.2 | 5 | 406.6 | 104.8 | 5 | 26.2 |
| G018633 | 37.9 | 6.9 | 5 | 593 | 170.3 | 5 | 38.2 |
| G018634 | 27.9 | 11.8 | 5 | 693.2 | 194.5 | 5 | 44.6 |

[1441] The data shown in FIGS. 12A-12B and Table 18 are from Sprague Dawley female rats (n=5 per group) administered 0.03 mg/kg and 0.1 mg/kg of total RNA and euthanized at 7 days post dose. Samples were processed as described above.

TABLE 18
Liver Editing and Serum TTR

| | Dose | | | | Serum TTR | | |
|---|---|---|---|---|---|---|---|
| Guide | (mpk) | % Editing | SD | n | (μg/ml) | SD | n |
| TSS | NA | 0.1 | 0 | 5 | 2764.5 | 420.1 | 5 |
| G000390 | 0.03 | 8.3 | 3.8 | 5 | 2027.3 | 238.1 | 5 |
| G000532 | 0.03 | 3.9 | 4.9 | 5 | 1909.8 | 405.1 | 5 |
| G018635 | 0.03 | 18.44 | 5.0 | 5 | 1575 | 272.8 | 5 |
| G018639 | 0.03 | 4.4 | 1.7 | 5 | 2216.4 | 386.8 | 5 |
| G018643 | 0.03 | 5.1 | 2.3 | 5 | 1929.3 | 136.1 | 5 |
| G018644 | 0.03 | 0.4 | 3.9 | 5 | 1836.1 | 542.2 | 5 |
| G000390 | 0.1 | 49.4 | 4.1 | 5 | 698.6 | 182.0 | 5 |
| G000532 | 0.1 | 18.5 | 1.4 | 5 | 1644.1 | 324.4 | 5 |
| G018635 | 0.1 | 54.2 | 5.8 | 5 | 403.4 | 297.6 | 5 |
| G018639 | 0.1 | 23.3 | 1.2 | 5 | 1359.9 | 400.7 | 5 |
| G018643 | 0.1 | 23.3 | 1.2 | 5 | 1508.1 | 297.0 | 5 |
| G018644 | 0.1 | 3.4 | 0.2 | 5 | 1657.5 | 464.7 | 5 |

The application's sequence listing, which the Patent Office published only in electronic form, follows.

SEQUENCE LISTING (1146 sequences)

SEQ ID NO: 1 - RNA, 88 nt, Artificial Sequence
  Synthetic
acacaaauaccaguccagcgguuuuagagcuagaaauagcaaguuaaaauaaggcuaguccguuaucaacuaagcaccgagucggugc

SEQ ID NO: 2 - RNA, 88 nt, Artificial Sequence
  Synthetic
acacaaauaccaguccagcgguuuuagagcuagaaauagcaaguuaaaauaaggcuaguccguuaucaacucagcaccgagucggugc

SEQ ID NO: 3 - RNA, 88 nt, Artificial Sequence
  Synthetic
acacaaauaccaguccagcgguuuuagagcuagaaauagcaaguuaaaauaaggcuaguccguuauccacuuggcaccgagucggugc

SEQ ID NO: 4 - RNA, 88 nt, Artificial Sequence
  Synthetic
acacaaauaccaguccagcgguuuuagagcuagaaauagcaaguuaaaauacggcuaguccguuaucaacuuggcaccgagucggugc

SEQ ID NO: 5 - RNA, 90 nt, Artificial Sequence
  Synthetic
acacaaauaccaguccagcgguuuuagagcuagaaauagcaaguuaaaauaaggcuaguccguuaucaagagcuggcaccgagucggugc

SEQ ID NO: 6 - RNA, 90 nt, Artificial Sequence
  Synthetic
acacaaauaccaguccagcgguuuuagagcuagaaauagcaaguuaaaauaaggcuaguccguuaucaagaaauggcaccgagucggugc

SEQ ID NO: 7 - RNA, 90 nt, Artificial Sequence
  Synthetic
acacaaauaccaguccagcgguuuuagagcuagaaauagcaaguuaaaauaaggcuaguccguuaucacgaaagggcaccgagucggugc

SEQ ID NO: 8 - RNA, 89 nt, Artificial Sequence
  Synthetic
acacaaauaccaguccagcgguuuuagagcuagaaauagcaaguuaaaauaaggcuaguccguuaucaaaaauggcaccgagucggugc

SEQ ID NO: 9 - RNA, 89 nt, Artificial Sequence
  Synthetic
acacaaauaccaguccagcgguuuuagagcuagaaauagcaaguuaaaauaaggcuaguccguuaucaaaaguggcaccgagucggugc

SEQ ID NO: 10 - RNA, 89 nt, Artificial Sequence
  Synthetic
acacaaauaccaguccagcgguuuuagagcuagaaauagcaaguuaaaauaaggcuaguccguuaucaacaguggcaccgagucggugc

SEQ ID NO: 11 - RNA, 88 nt, Artificial Sequence
  Synthetic
acacaaauaccaguccagcgguuuuagagcuagaaauagcaaguuaaaauaaggcuaguccguuaucacaagggcaccgagucggugc

SEQ ID NO: 12 - RNA, 88 nt, Artificial Sequence
  Synthetic
acacaaauaccaguccagcgguuuuagagcuagaaauagcaaguuaaaauaaggcuaguccguuaucaaaauggcaccgagucggugc

SEQ ID NO: 13 - RNA, 86 nt, Artificial Sequence
  Synthetic
acacaaauaccaguccagcgguuuuagagcuagaaauagcaaguuaaaauaaggcuaguccguuaucaaaggcaccgagucggugc

SEQ ID NO: 14 - RNA, 86 nt, Artificial Sequence
  Synthetic
acacaaauaccaguccagcgguuuuagagcuagaaauagcaaguuaaaauaaggcuaguccguuaucaagggcaccgagucggugc

SEQ ID NO: 15 - RNA, 84 nt, Artificial Sequence
  Synthetic
acacaaauaccaguccagcgguuuuagagcuagaaauagcaaguuaaaauaaggcuaguccguuaucaggcaccgagucggugc

SEQ ID NO: 16 - RNA, 87 nt, Artificial Sequence
  Synthetic
acacaaauaccaguccagcgguuuuagagcuagaauagcaaguuaaaauaaggcuaguccguuaucaacuuggcaccgagucggugc

SEQ ID NO: 17 - RNA, 87 nt, Artificial Sequence
  Synthetic
acacaaauaccaguccagcgguuuuagagcgcaaagcgcaaguuaaaauaaggcuaguccguuaucaacuuggcaccgagucggugc

SEQ ID NO: 18 - RNA, 87 nt, Artificial Sequence
  Synthetic
acacaaauaccaguccagcgguuuuagagcgcgaagcgcaaguuaaaauaaggcuaguccguuaucaacuuggcaccgagucggugc

SEQ ID NO: 19 - RNA, 87 nt, Artificial Sequence
  Synthetic
acacaaauaccaguccagcgguuuuagagcggaaacgcaaguuaaaauaaggcuaguccguuaucaacuuggcaccgagucggugcu

SEQ ID NO: 20 - RNA, 86 nt, Artificial Sequence
  Synthetic
acacaaauaccaguccagcgguuuuagagcggaaacgcaaguuaaaauaaggcuaguccguuaucaacuuggcaccgagucggugc

SEQ ID NO: 21 - RNA, 86 nt, Artificial Sequence
  Synthetic
acacaaauaccaguccagcgguuuuagagccgaaaggcaaguuaaaauaaggcuaguccguuaucaacuuggcaccgagucggugc

SEQ ID NO: 22 - RNA, 86 nt, Artificial Sequence
  Synthetic
acacaaauaccaguccagcgguuuuagagcugaaaagcaaguuaaaauaaggcuaguccguuaucaacuuggcaccgagucggugc

SEQ ID NO: 23 - RNA, 84 nt, Artificial Sequence
  Synthetic
acacaaauaccaguccagcgguuuuagagcgaaagcaaguuaaaauaaggcuaguccguuaucaacuuggcaccgagucggugc

SEQ ID NO: 24 - RNA, 83 nt, Artificial Sequence
  Synthetic
acacaaauaccaguccagcgguuuuagagcgaagcaaguuaaaauaaggcuaguccguuaucaacuuggcaccgagucggugc

SEQ ID NO: 25 - RNA, 83 nt, Artificial Sequence
  Synthetic
acacaaauaccaguccagcgguuuuagagcaaagcaaguuaaaauaaggcuaguccguuaucaacuuggcaccgagucggugc

SEQ ID NO: 26 - RNA, 82 nt, Artificial Sequence
  Synthetic
acacaaauaccaguccagcgguuuuagaggaaacaaguuaaaauaaggcuaguccguuaucaacuuggcaccgagucggugc

SEQ ID NO: 27 - RNA, 82 nt, Artificial Sequence
  Synthetic
acacaaauaccaguccagcgguuuuagagcaagcaaguuaaaauaaggcuaguccguuaucaacuuggcaccgagucggugc

SEQ ID NO: 28 - RNA, 82 nt, Artificial Sequence
  Synthetic
acacaaauaccaguccagcgguuuuagagcgagcaaguuaaaauaaggcuaguccguuaucaacuuggcaccgagucggugc

SEQ ID NO: 29 - RNA, 80 nt, Artificial Sequence
  Synthetic
acacaaauaccaguccagcgguuuuagagcgcaaguuaaaauaaggcuaguccguuaucaacuuggcaccgagucggugc

SEQ ID NO: 30 - RNA, 80 nt, Artificial Sequence
  Synthetic
acacaaauaccaguccagcgguuuuagagaacaaguuaaaauaaggcuaguccguuaucaacuuggcaccgagucggugc

SEQ ID NO: 31 - RNA, 79 nt, Artificial Sequence
  Synthetic
acacaaauaccaguccagcgguuuuagagacaaguuaaaauaaggcuaguccguuaucaacuuggcaccgagucggugc

SEQ ID NO: 32 - RNA, 78 nt, Artificial Sequence
  Synthetic
acacaaauaccaguccagcgguuuuagagcaaguuaaaauaaggcuaguccguuaucaacuuggcaccgagucggugc

SEQ ID NO: 33 - RNA, 78 nt, Artificial Sequence
  Synthetic
acacaaauaccaguccagcgguuuuagaaaaaguuaaaauaaggcuaguccguuaucaacuuggcaccgagucggugc

SEQ ID NO: 34 - RNA, 77 nt, Artificial Sequence
  Synthetic
acacaaauaccaguccagcgguuuuagaaaaguuaaaauaaggcuaguccguuaucaacuuggcaccgagucggugc

SEQ ID NO: 35 - RNA, 87 nt, Artificial Sequence
  Synthetic
acacaaauaccaguccagcgguuuuagagcuagaaauagcaaguuaaaauaaggcuaguccguuaucaacuuggcaccgagucggug

SEQ ID NO: 36 - RNA, 86 nt, Artificial Sequence
  Synthetic
acacaaauaccaguccagcgguuuuagagcuagaaauagcaaguuaaaauaaggcuaguccguuaucaacuuggcaccgagucggu

SEQ ID NO: 37 - RNA, 85 nt, Artificial Sequence
  Synthetic
acacaaauaccaguccagcgguuuuagagcuagaaauagcaaguuaaaauaaggcuaguccguuaucaacuuggcaccgagucgg

SEQ ID NO: 38 - RNA, 84 nt, Artificial Sequence
  Synthetic
acacaaauaccaguccagcgguuuuagagcuagaaauagcaaguuaaaauaaggcuaguccguuaucaacuuggcaccgagucg

SEQ ID NO: 39 - RNA, 83 nt, Artificial Sequence
  Synthetic
acacaaauaccaguccagcgguuuuagagcuagaaauagcaaguuaaaauaaggcuaguccguuaucaacuuggcaccgaguc

SEQ ID NO: 40 - RNA, 82 nt, Artificial Sequence
  Synthetic
acacaaauaccaguccagcgguuuuagagcuagaaauagcaaguuaaaauaaggcuaguccguuaucaacuuggcaccgagu

SEQ ID NO: 41 - RNA, 82 nt, Artificial Sequence
  Synthetic
acacaaauaccaguccagcgguuuuagagcgaaagcaaguuaaaauaaggcuaguccguuaucacuggcaccgagucggugc

SEQ ID NO: 42 - RNA, 80 nt, Artificial Sequence
  Synthetic
acacaaauaccaguccagcgguuuuagagcgaaagcaaguuaaaauaaggcuaguccguuaucaggcaccgagucggugc

SEQ ID NO: 43 - RNA, 80 nt, Artificial Sequence
  Synthetic
acacaaauaccaguccagcgguuuuagagaaaaaguuaaaauaaggcuaguccguuaucaacuuggcaccgagucggugc

SEQ ID NO: 44 - RNA, 80 nt, Artificial Sequence
  Synthetic
acacaaauaccaguccagcgguuuuagaggaaacaaguuaaaauaaggcuaguccguuaucaauggcaccgagucggugc

SEQ ID NO: 45 - RNA, 78 nt, Artificial Sequence
  Synthetic
acacaaauaccaguccagcgguuuuagagaaaaaguuaaaauaaggcuaguccguuaucaauggcaccgagucggugc

SEQ ID NO: 46 - RNA, 80 nt, Artificial Sequence
  Synthetic
acacaaauaccaguccagcgguuuuagaggaaacaaguuaaaauaaggcuaguccguuaucacuggcaccgagucggugc

SEQ ID NO: 47 - RNA, 76 nt, Artificial Sequence
  Synthetic
acacaaauaccaguccagcgguuuuagagaaaaaguuaaaauaaggcuaguccguuaucaggcaccgagucggugc

SEQ ID NO: 48 - RNA, 86 nt, Artificial Sequence
  Synthetic
acacaaauaccaguccagcgguuuuagagcgaaagcaaguuaaaauaaggcuaguccguuaucaagcuauggcaccgagucggugc

SEQ ID NO: 49 - RNA, 87 nt, Artificial Sequence
  Synthetic
acacaaauaccaguccagcgguuuuagagcuagaaauagcaaguuaaaauaaggcaguccguuaucaacuuggcaccgagucggugc

SEQ ID NO: 50 - RNA, 87 nt, Artificial Sequence
  Synthetic
acacaaauaccaguccagcgguuuuagagcuagaaauagcaaguuaaaauaaggcuguccguuaucaacuuggcaccgagucggugc

SEQ ID NO: 51 - RNA, 86 nt, Artificial Sequence
  Synthetic
acacaaauaccaguccagcgguuuuagagcuagaaauagcaaguuaaaauaaggcguccguuaucaacuuggcaccgagucggugc

SEQ ID NO: 52 - RNA, 86 nt, Artificial Sequence
  Synthetic
acacaaauaccaguccagcgguuuuagagcuagaaauagcaaguuaaaauaagguauccguuaucaacuuggcaccgagucggugc

SEQ ID NO: 53 - RNA, 85 nt, Artificial Sequence
  Synthetic
acacaaauaccaguccagcgguuuuagagcuagaaauagcaaguuaaaauaagguuccguuaucaacuuggcaccgagucggugc

SEQ ID NO: 54 - RNA, 85 nt, Artificial Sequence
  Synthetic
acacaaauaccaguccagcgguuuuagagcuagaaauagcaaguuaaaauaaggauccguuaucaacuuggcaccgagucggugc

SEQ ID NO: 55 - RNA, 88 nt, Artificial Sequence
  Synthetic
acacaaauaccaguccagcgguuuucgagcuagaaauagcaagugaaaauaaggcuaguccguuaucaacuuggcaccgagucggugc

SEQ ID NO: 56 - RNA, 88 nt, Artificial Sequence
  Synthetic
acacaaauaccaguccagcgguuuuugagcuagaaauagcaaguaaaaauaaggcuaguccguuaucaacuuggcaccgagucggugc

SEQ ID NO: 57 - RNA, 88 nt, Artificial Sequence
  Synthetic
acacaaauaccaguccagcgguuuuagagcgagaaaucgcaaguuaaaauaaggcuaguccguuaucaacuuggcaccgagucggugc

SEQ ID NO: 58 - RNA, 88 nt, Artificial Sequence
  Synthetic
acacaaauaccaguccagcgguuuuagagcuagaaauagcgaguuaaaauaaggcuaguccguuaucaacuuggcaccgagucggugc

SEQ ID NO: 59 - RNA, 88 nt, Artificial Sequence
  Synthetic
acacaaauaccaguccagcgguuuuagagcuagaaauagccgguuaaaauaaggcuaguccguuaucaacuuggcaccgagucggugc

SEQ ID NO: 60 - RNA, 88 nt, Artificial Sequence
  Synthetic
acacaaauaccaguccagcgguuuuagagcuagaaauagcaaguuaaaaugaggcuaguccguuaucaacuuggcaccgagucggugc

SEQ ID NO: 61 - RNA, 88 nt, Artificial Sequence
  Synthetic
acacaaauaccaguccagcgguuuuagagcuagaaauagcaaguuaaaauaaggcugguccguuaucaacuuggcaccgagucggugc

SEQ ID NO: 62 - RNA, 88 nt, Artificial Sequence
  Synthetic
acacaaauaccaguccagcgguuuuagagcuagaaauagcaaguuaaaauaaggcucguccguuaucaacuuggcaccgagucggugc

SEQ ID NO: 63 - RNA, 88 nt, Artificial Sequence
  Synthetic
acacaaauaccaguccagcgguuuuagagcuagaaauagcaaguuaaaauaaggcuuguccguuaucaacuuggcaccgagucggugc

SEQ ID NO: 64 - RNA, 88 nt, Artificial Sequence
  Synthetic
acacaaauaccaguccagcgguuuuagagcuagaaauagcaaguuaaaauaaggcuaguccguugucaacuuggcaccgagucggugc

SEQ ID NO: 65 - RNA, 88 nt, Artificial Sequence
  Synthetic
acacaaauaccaguccagcgguuuuagagcuagaaauagcaaguuaaaauaaggcuaguccguucucaacuuggcaccgagucggugc

SEQ ID NO: 66 - RNA, 88 nt, Artificial Sequence
  Synthetic
acacaaauaccaguccagcgguuuuagagcuagaaauagcaaguuaaaauaaggcuaguccguuuucaacuuggcaccgagucggugc

SEQ ID NO: 67 - RNA, 88 nt, Artificial Sequence
  Synthetic
acacaaauaccaguccagcgguuuuagagcuagaaauagcaaguuaaaauaaggcuaguccguuaugaacuuggcaccgagucggugc

SEQ ID NO: 68 - RNA, 88 nt, Artificial Sequence
  Synthetic
acacaaauaccaguccagcgguuuuagagcuagaaauagcaaguuaaaauaaggcuaguccguuaucaacuugggaccgagucggucc

SEQ ID NO: 69 - RNA, 88 nt, Artificial Sequence
  Synthetic
acacaaauaccaguccagcgguuuuagagcuagaaauagcaaguuaaaauaaggcuaguccguuaucaacuuggaaccgagucgguuc

SEQ ID NO: 70 - RNA, 88 nt, Artificial Sequence
  Synthetic
acacaaauaccaguccagcgguuuucgagcgagaaaucgcgagugaaaaugaggcugguccguugugaacuuggaaccgagucgguuc

SEQ ID NO: 71 - RNA, 88 nt, Artificial Sequence
  Synthetic
acacaaauaccaguccagcgguuuuugagcgagaaaucgcaaguaaaaauaaggcucguccguucugaacuuggaaccgagucgguuc

SEQ ID NO: 72 - RNA, 88 nt, Artificial Sequence
  Synthetic
acacaaauaccaguccagcgguuucggagccggaaacggcgagucgaaaugaggcugguccguugucggcucggaaccgagucgguuc

SEQ ID NO: 73 - RNA, 98 nt, Artificial Sequence
  Synthetic
cucacugaaaagugagucuggagagcugcaguuuuagagcuagaaauagcaaguuaaaauaaggcuaguccguuaucaacuuggcaccgagucggugc

SEQ ID NO: 74 - RNA, 96 nt, Artificial Sequence
  Synthetic
cacugaaaagugagucuggagagcugcaguuuuagagcuagaaauagcaaguuaaaauaaggcuaguccguuaucaacuuggcaccgagucggugc

SEQ ID NO: 75 - RNA, 94 nt, Artificial Sequence
  Synthetic
cugaaaagugagucuggagagcugcaguuuuagagcuagaaauagcaaguuaaaauaaggcuaguccguuaucaacuuggcaccgagucggugc

SEQ ID NO: 76 - RNA, 82 nt, Artificial Sequence
  Synthetic
ucuggagagcugcaguuuuagagcuagaaauagcaaguuaaaauaaggcuaguccguuaucaacuuggcaccgagucggugc

SEQ ID NO: 77 - RNA, 84 nt, Artificial Sequence
  Synthetic
agucuggagagcugcaguuuuagagcuagaaauagcaaguuaaaauaaggcuaguccguuaucaacuuggcaccgagucggugc

SEQ ID NO: 78 - RNA, 86 nt, Artificial Sequence
  Synthetic
ugagucuggagagcugcaguuuuagagcuagaaauagcaaguuaaaauaaggcuaguccguuaucaacuuggcaccgagucggugc

SEQ ID NO: 79 - RNA, 92 nt, Artificial Sequence
  Synthetic
gaaaagugagucuggagagcugcaguuuuagagcuagaaauagcaaguuaaaauaaggcuaguccguuaucaacuuggcaccgagucggugc

SEQ ID NO: 80 - RNA, 88 nt, Artificial Sequence
  Synthetic
acacaaauaccaguccagcgguuuuagagcuagaaauagcaaguuaaaauaaggcuaguccguuaucaacuuggcaccgagucggugc

SEQ ID NO: 81 - RNA, 90 nt, Artificial Sequence; identical to SEQ ID NO: 7
  Synthetic

SEQ ID NO: 82 - RNA, 89 nt, Artificial Sequence; identical to SEQ ID NO: 8
  Synthetic

SEQ ID NO: 83 - RNA, 88 nt, Artificial Sequence; identical to SEQ ID NO: 11
  Synthetic

SEQ ID NO: 84 - RNA, 88 nt, Artificial Sequence; identical to SEQ ID NO: 12
  Synthetic

SEQ ID NO: 85 - RNA, 87 nt, Artificial Sequence
  Synthetic
acacaaauaccaguccagcgguuuuagagcgcgaagcgcaaguuaaaauaaggcuaguccguuaucaaaauggcaccgagucggugc

SEQ ID NO: 86 - RNA, 86 nt, Artificial Sequence
  Synthetic
acacaaauaccaguccagcgguuuuagagcugaaaagcaaguuaaaauaaggcuaguccguuaucaaaauggcaccgagucggugc

SEQ ID NO: 87 - RNA, 84 nt, Artificial Sequence
  Synthetic
acacaaauaccaguccagcgguuuuagagcgaaagcaaguuaaaauaaggcuaguccguuaucaaaauggcaccgagucggugc

SEQ ID NO: 88 - RNA, 83 nt, Artificial Sequence
  Synthetic
acacaaauaccaguccagcgguuuuagagcaaagcaaguuaaaauaaggcuaguccguuaucaaaauggcaccgagucggugc

SEQ ID NO: 89 - RNA, 84 nt, Artificial Sequence; identical to SEQ ID NO: 23
  Synthetic

SEQ ID NO: 90 - RNA, 86 nt, Artificial Sequence
  Synthetic
acacaaauaccaguccagcgguuuuagagcgaaagcaaguuaaaauaaggcuaguccguuaucaagaaauggcaccgagucggugc

SEQ ID NO: 91 - RNA, 100 nt, Artificial Sequence
  Synthetic
acacaaauaccaguccagcgguuuuagagcuagaaauagcaaguuaaaauaaggcuaguccguuaucaacuugaaaaaguggcaccgagucggugcuuuu

SEQ ID NO: 92 - RNA, 100 nt, Artificial Sequence; identical to SEQ ID NO: 91
  Synthetic

SEQ ID NO: 93 - RNA, 100 nt, Artificial Sequence; identical to SEQ ID NO: 91
  Synthetic

SEQ ID NO: 94 - RNA, 88 nt, Artificial Sequence; identical to SEQ ID NO: 80
  Synthetic

SEQ ID NO: 95 - RNA, 88 nt, Artificial Sequence; identical to SEQ ID NO: 80
  Synthetic

SEQ ID NO: 96 - RNA, 84 nt, Artificial Sequence
  Synthetic
acacaaauaccaguccagcgguuuuagagcuagaaauagcaaguuaaaauaaggcuaguccguuaucaagcaccgagucggugc

SEQ ID NO: 97 - RNA, 80 nt, Artificial Sequence
  Synthetic
acacaaauaccaguccagcgguuuuagagcgaaagcaaguuaaaauaaggcuaguccguuaucaagcaccgagucggugc

SEQ ID NO: 98 - RNA, 100 nt, Artificial Sequence
  Synthetic
acacaaauaccaguccagcgguuuucgagcgagaaaucgcgagugaaaaugaggcugguccgugaugaacuugaaaaagugggaccgagucgguccuuuu

SEQ ID NO: 99-100 - skipped (2 entries)

SEQ ID NO: 101 - RNA, 88 nt, Artificial Sequence; identical to SEQ ID NO: 1
  Synthetic
  misc_feature: 3 consecutive nucleotides at 5' and 3' end modified with 2'-OMe and a 3' PS linkage

SEQ ID NO: 102 - RNA, 88 nt, Artificial Sequence; identical to SEQ ID NO: 2
  Synthetic
  misc_feature: 3 consecutive nucleotides at 5' and 3' end modified with 2'-OMe and a 3' PS linkage

SEQ ID NO: 103 - RNA, 88 nt, Artificial Sequence; identical to SEQ ID NO: 3
  Synthetic
  misc_feature: 3 consecutive nucleotides at 5' and 3' end modified with 2'-OMe and a 3' PS linkage

SEQ ID NO: 104 - RNA, 88 nt, Artificial Sequence; identical to SEQ ID NO: 4
  Synthetic
  misc_feature: 3 consecutive nucleotides at 5' and 3' end modified with 2'-OMe and a 3' PS linkage

SEQ ID NO: 105 - RNA, 90 nt, Artificial Sequence; identical to SEQ ID NO: 5
  Synthetic
  misc_feature: 3 consecutive nucleotides at 5' and 3' end modified with 2'-OMe and a 3' PS linkage

SEQ ID NO: 106 - RNA, 90 nt, Artificial Sequence; identical to SEQ ID NO: 6
  Synthetic
  misc_feature: 3 consecutive nucleotides at 5' and 3' end modified with 2'-OMe and a 3' PS linkage

SEQ ID NO: 107 - RNA, 90 nt, Artificial Sequence; identical to SEQ ID NO: 7
  Synthetic
  misc_feature: 3 consecutive nucleotides at 5' and 3' end modified with 2'-OMe and a 3' PS linkage

SEQ ID NO: 108 - RNA, 89 nt, Artificial Sequence; identical to SEQ ID NO: 8
  Synthetic
  misc_feature: 3 consecutive nucleotides at 5' and 3' end modified with 2'-OMe and a 3' PS linkage

SEQ ID NO: 109 - RNA, 89 nt, Artificial Sequence; identical to SEQ ID NO: 9
  Synthetic
  misc_feature: 3 consecutive nucleotides at 5' and 3' end modified with 2'-OMe and a 3' PS linkage

SEQ ID NO: 110 - RNA, 89 nt, Artificial Sequence; identical to SEQ ID NO: 10
  Synthetic
  misc_feature: 3 consecutive nucleotides at 5' and 3' end modified with 2'-OMe and a 3' PS linkage

SEQ ID NO: 111 - RNA, 88 nt, Artificial Sequence; identical to SEQ ID NO: 11
  Synthetic
  misc_feature: 3 consecutive nucleotides at 5' and 3' end modified with 2'-OMe and a 3' PS linkage

SEQ ID NO: 112 - RNA, 88 nt, Artificial Sequence; identical to SEQ ID NO: 12
  Synthetic
  misc_feature: 3 consecutive nucleotides at 5' and 3' end modified with 2'-OMe and a 3' PS linkage

SEQ ID NO: 113 - RNA, 86 nt, Artificial Sequence; identical to SEQ ID NO: 13
  Synthetic
  misc_feature: 3 consecutive nucleotides at 5' and 3' end modified with 2'-OMe and a 3' PS linkage

SEQ ID NO: 114 - RNA, 86 nt, Artificial Sequence; identical to SEQ ID NO: 14
  Synthetic
  misc_feature: 3 consecutive nucleotides at 5' and 3' end modified with 2'-OMe and a 3' PS linkage

SEQ ID NO: 115 - RNA, 84 nt, Artificial Sequence; identical to SEQ ID NO: 15
  Synthetic
  misc_feature: 3 consecutive nucleotides at 5' and 3' end modified with 2'-OMe and a 3' PS linkage

SEQ ID NO: 116 - RNA, 87 nt, Artificial Sequence; identical to SEQ ID NO: 16
  Synthetic
  misc_feature: 3 consecutive nucleotides at 5' and 3' end modified with 2'-OMe and a 3' PS linkage

SEQ ID NO: 117 - RNA, 87 nt, Artificial Sequence; identical to SEQ ID NO: 17
  Synthetic
  misc_feature: 3 consecutive nucleotides at 5' and 3' end modified with 2'-OMe and a 3' PS linkage

SEQ ID NO: 118 - RNA, 87 nt, Artificial Sequence; identical to SEQ ID NO: 18
  Synthetic
  misc_feature: 3 consecutive nucleotides at 5' and 3' end modified with 2'-OMe and a 3' PS linkage

SEQ ID NO: 119 - RNA, 87 nt, Artificial Sequence; identical to SEQ ID NO: 19
  Synthetic
  misc_feature: 3 consecutive nucleotides at 5' and 3' end modified with 2'-OMe and a 3' PS linkage

SEQ ID NO: 120 - RNA, 86 nt, Artificial Sequence; identical to SEQ ID NO: 20
  Synthetic
  misc_feature: 3 consecutive nucleotides at 5' and 3' end modified with 2'-OMe and a 3' PS linkage

SEQ ID NO: 121 - RNA, 86 nt, Artificial Sequence; identical to SEQ ID NO: 21
  Synthetic
  misc_feature: 3 consecutive nucleotides at 5' and 3' end modified with 2'-OMe and a 3' PS linkage

SEQ ID NO: 122 - RNA, 86 nt, Artificial Sequence; identical to SEQ ID NO: 22
  Synthetic
  misc_feature: 3 consecutive nucleotides at 5' and 3' end modified with 2'-OMe and a 3' PS linkage

SEQ ID NO: 123 - RNA, 84 nt, Artificial Sequence; identical to SEQ ID NO: 23
  Synthetic
  misc_feature: 3 consecutive nucleotides at 5' and 3' end modified with 2'-OMe and a 3' PS linkage

SEQ ID NO: 124 - RNA, 83 nt, Artificial Sequence; identical to SEQ ID NO: 24
  Synthetic
  misc_feature: 3 consecutive nucleotides at 5' and 3' end modified with 2'-OMe and a 3' PS linkage

SEQ ID NO: 125 - RNA, 83 nt, Artificial Sequence; identical to SEQ ID NO: 25
  Synthetic
  misc_feature: 3 consecutive nucleotides at 5' and 3' end modified with 2'-OMe and a 3' PS linkage

SEQ ID NO: 126 - RNA, 82 nt, Artificial Sequence; identical to SEQ ID NO: 26
  Synthetic
  misc_feature: 3 consecutive nucleotides at 5' and 3' end modified with 2'-OMe and a 3' PS linkage

SEQ ID NO: 127 - RNA, 82 nt, Artificial Sequence; identical to SEQ ID NO: 27
  Synthetic
  misc_feature: 3 consecutive nucleotides at 5' and 3' end modified with 2'-OMe and a 3' PS linkage

SEQ ID NO: 128 - RNA, 82 nt, Artificial Sequence; identical to SEQ ID NO: 28
  Synthetic
  misc_feature: 3 consecutive nucleotides at 5' and 3' end modified with 2'-OMe and a 3' PS linkage

SEQ ID NO: 129 - RNA, 80 nt, Artificial Sequence; identical to SEQ ID NO: 29
  Synthetic
  misc_feature: 3 consecutive nucleotides at 5' and 3' end modified with 2'-OMe and a 3' PS linkage

SEQ ID NO: 130 - RNA, 80 nt, Artificial Sequence; identical to SEQ ID NO: 30
  Synthetic
  misc_feature: 3 consecutive nucleotides at 5' and 3' end modified with 2'-OMe and a 3' PS linkage

SEQ ID NO: 131 - RNA, 79 nt, Artificial Sequence; identical to SEQ ID NO: 31
  Synthetic
  misc_feature: 3 consecutive nucleotides at 5' and 3' end modified with 2'-OMe and a 3' PS linkage

SEQ ID NO: 132 - RNA, 78 nt, Artificial Sequence; identical to SEQ ID NO: 32
  Synthetic
  misc_feature: 3 consecutive nucleotides at 5' and 3' end modified with 2'-OMe and a 3' PS linkage

SEQ ID NO: 133 - RNA, 78 nt, Artificial Sequence; identical to SEQ ID NO: 33
  Synthetic
  misc_feature: 3 consecutive nucleotides at 5' and 3' end modified with 2'-OMe and a 3' PS linkage

SEQ ID NO: 134 - RNA, 77 nt, Artificial Sequence; identical to SEQ ID NO: 34
  Synthetic
  misc_feature: 3 consecutive nucleotides at 5' and 3' end modified with 2'-OMe and a 3' PS linkage

SEQ ID NO: 135 - RNA, 87 nt, Artificial Sequence; identical to SEQ ID NO: 35
  Synthetic
  misc_feature: 3 consecutive nucleotides at 5' and 3' end modified with 2'-OMe and a 3' PS linkage

SEQ ID NO: 136 - RNA, 86 nt, Artificial Sequence; identical to SEQ ID NO: 36
  Synthetic
  misc_feature: 3 consecutive nucleotides at 5' and 3' end modified with 2'-OMe and a 3' PS linkage

SEQ ID NO: 137 - RNA, 85 nt, Artificial Sequence; identical to SEQ ID NO: 37
  Synthetic
  misc_feature: 3 consecutive nucleotides at 5' and 3' end modified with 2'-OMe and a 3' PS linkage

SEQ ID NO: 138 - RNA, 84 nt, Artificial Sequence; identical to SEQ ID NO: 38
  Synthetic
  misc_feature: 3 consecutive nucleotides at 5' and 3' end modified with 2'-OMe and a 3' PS linkage

SEQ ID NO: 139 - RNA, 83 nt, Artificial Sequence; identical to SEQ ID NO: 39
  Synthetic
  misc_feature: 3 consecutive nucleotides at 5' and 3' end modified with 2'-OMe and a 3' PS linkage

SEQ ID NO: 140 - RNA, 82 nt, Artificial Sequence; identical to SEQ ID NO: 40
  Synthetic
  misc_feature: 3 consecutive nucleotides at 5' and 3' end modified with 2'-OMe and a 3' PS linkage

SEQ ID NO: 141 - RNA, 82 nt, Artificial Sequence; identical to SEQ ID NO: 41
  Synthetic
  misc_feature: 3 consecutive nucleotides at 5' and 3' end modified with 2'-OMe and a 3' PS linkage

SEQ ID NO: 142 - RNA, 80 nt, Artificial Sequence; identical to SEQ ID NO: 42
  Synthetic
  misc_feature: 3 consecutive nucleotides at 5' and 3' end modified with 2'-OMe and a 3' PS linkage

SEQ ID NO: 143 - RNA, 80 nt, Artificial Sequence; identical to SEQ ID NO: 43
  Synthetic
  misc_feature: 3 consecutive nucleotides at 5' and 3' end modified with 2'-OMe and a 3' PS linkage

SEQ ID NO: 144 - RNA, 80 nt, Artificial Sequence; identical to SEQ ID NO: 44
  Synthetic
  misc_feature: 3 consecutive nucleotides at 5' and 3' end modified with 2'-OMe and a 3' PS linkage

SEQ ID NO: 145 - RNA, 78 nt, Artificial Sequence; identical to SEQ ID NO: 45
  Synthetic
  misc_feature: 3 consecutive nucleotides at 5' and 3' end modified with 2'-OMe and a 3' PS linkage

SEQ ID NO: 146 - RNA, 80 nt, Artificial Sequence; identical to SEQ ID NO: 46
  Synthetic
  misc_feature: 3 consecutive nucleotides at 5' and 3' end modified with 2'-OMe and a 3' PS linkage

SEQ ID NO: 147 - RNA, 76 nt, Artificial Sequence; identical to SEQ ID NO: 47
  Synthetic
  misc_feature: 3 consecutive nucleotides at 5' and 3' end modified with 2'-OMe and a 3' PS linkage

SEQ ID NO: 148 - RNA, 86 nt, Artificial Sequence; identical to SEQ ID NO: 48
  Synthetic
  misc_feature: 3 consecutive nucleotides at 5' and 3' end modified with 2'-OMe and a 3' PS linkage

SEQ ID NO: 149 - RNA, 87 nt, Artificial Sequence; identical to SEQ ID NO: 49
  Synthetic
  misc_feature: 3 consecutive nucleotides at 5' and 3' end modified with 2'-OMe and a 3' PS linkage

SEQ ID NO: 150 - RNA, 87 nt, Artificial Sequence; identical to SEQ ID NO: 50
  Synthetic
  misc_feature: 3 consecutive nucleotides at 5' and 3' end modified with 2'-OMe and a 3' PS linkage

SEQ ID NO: 151 - RNA, 86 nt, Artificial Sequence; identical to SEQ ID NO: 51
  Synthetic
  misc_feature: 3 consecutive nucleotides at 5' and 3' end modified with 2'-OMe and a 3' PS linkage

SEQ ID NO: 152 - RNA, 86 nt, Artificial Sequence; identical to SEQ ID NO: 52
  Synthetic
  misc_feature: 3 consecutive nucleotides at 5' and 3' end modified with 2'-OMe and a 3' PS linkage

SEQ ID NO: 153 - RNA, 85 nt, Artificial Sequence; identical to SEQ ID NO: 53
  Synthetic
  misc_feature: 3 consecutive nucleotides at 5' and 3' end modified with 2'-OMe and a 3' PS linkage

SEQ ID NO: 154 - RNA, 85 nt, Artificial Sequence; identical to SEQ ID NO: 54
  Synthetic
  misc_feature: 3 consecutive nucleotides at 5' and 3' end modified with 2'-OMe and a 3' PS linkage

SEQ ID NO: 155 - RNA, 88 nt, Artificial Sequence; identical to SEQ ID NO: 55
  Synthetic
  misc_feature: 3 consecutive nucleotides at 5' and 3' end modified with 2'-OMe and a 3' PS linkage

SEQ ID NO: 156 - RNA, 88 nt, Artificial Sequence; identical to SEQ ID NO: 56
  Synthetic
  misc_feature: 3 consecutive nucleotides at 5' and 3' end modified with 2'-OMe and a 3' PS linkage

SEQ ID NO: 157 - RNA, 88 nt, Artificial Sequence; identical to SEQ ID NO: 57
  Synthetic
  misc_feature: 3 consecutive nucleotides at 5' and 3' end modified with 2'-OMe and a 3' PS linkage

SEQ ID NO: 158 - RNA, 88 nt, Artificial Sequence; identical to SEQ ID NO: 58
  Synthetic
  misc_feature: 3 consecutive nucleotides at 5' and 3' end modified with 2'-OMe and a 3' PS linkage

SEQ ID NO: 159 - RNA, 88 nt, Artificial Sequence; identical to SEQ ID NO: 59
  Synthetic
  misc_feature: 3 consecutive nucleotides at 5' and 3' end modified with 2'-OMe and a 3' PS linkage

SEQ ID NO: 160 - RNA, 88 nt, Artificial Sequence; identical to SEQ ID NO: 60
  Synthetic
  misc_feature: 3 consecutive nucleotides at 5' and 3' end modified with 2'-OMe and a 3' PS linkage

SEQ ID NO: 161 - RNA, 88 nt, Artificial Sequence; identical to SEQ ID NO: 61
  Synthetic
  misc_feature: 3 consecutive nucleotides at 5' and 3' end modified with 2'-OMe and a 3' PS linkage

SEQ ID NO: 162 - RNA, 88 nt, Artificial Sequence; identical to SEQ ID NO: 62
  Synthetic
  misc_feature: 3 consecutive nucleotides at 5' and 3' end modified with 2'-OMe and a 3' PS linkage

SEQ ID NO: 163 - RNA, 88 nt, Artificial Sequence; identical to SEQ ID NO: 63
  Synthetic
  misc_feature: 3 consecutive nucleotides at 5' and 3' end modified with 2'-OMe and a 3' PS linkage

SEQ ID NO: 164 - RNA, 88 nt, Artificial Sequence; identical to SEQ ID NO: 64
  Synthetic
  misc_feature: 3 consecutive nucleotides at 5' and 3' end modified with 2'-OMe and a 3' PS linkage

SEQ ID NO: 165 - RNA, 88 nt, Artificial Sequence; identical to SEQ ID NO: 65
  Synthetic
  misc_feature: 3 consecutive nucleotides at 5' and 3' end modified with 2'-OMe and a 3' PS linkage

SEQ ID NO: 166 - RNA, 88 nt, Artificial Sequence; identical to SEQ ID NO: 66
  Synthetic
  misc_feature: 3 consecutive nucleotides at 5' and 3' end modified with 2'-OMe and a 3' PS linkage

SEQ ID NO: 167 - RNA, 88 nt, Artificial Sequence; identical to SEQ ID NO: 67
  Synthetic
  misc_feature: 3 consecutive nucleotides at 5' and 3' end modified with 2'-OMe and a 3' PS linkage

SEQ ID NO: 168 - RNA, 88 nt, Artificial Sequence; identical to SEQ ID NO: 68
  Synthetic
  misc_feature: 3 consecutive nucleotides at 5' and 3' end modified with 2'-OMe and a 3' PS linkage

SEQ ID NO: 169 - RNA, 88 nt, Artificial Sequence; identical to SEQ ID NO: 69
  Synthetic
  misc_feature: 3 consecutive nucleotides at 5' and 3' end modified with 2'-OMe and a 3' PS linkage

SEQ ID NO: 170 - RNA, 88 nt, Artificial Sequence; identical to SEQ ID NO: 70
  Synthetic
  misc_feature: 3 consecutive nucleotides at 5' and 3' end modified with 2'-OMe and a 3' PS linkage

SEQ ID NO: 171 - RNA, 88 nt, Artificial Sequence; identical to SEQ ID NO: 71
  Synthetic
  misc_feature: 3 consecutive nucleotides at 5' and 3' end modified with 2'-OMe and a 3' PS linkage

SEQ ID NO: 172 - RNA, 88 nt, Artificial Sequence; identical to SEQ ID NO: 72
  Synthetic
  misc_feature: 3 consecutive nucleotides at 5' and 3' end modified with 2'-OMe and a 3' PS linkage

SEQ ID NO: 173 - RNA, 98 nt, Artificial Sequence; identical to SEQ ID NO: 73
  Synthetic
  misc_feature: 3 consecutive nucleotides at 5' and 3' end modified with 2'-OMe and a 3' PS linkage

SEQ ID NO: 174 - RNA, 96 nt, Artificial Sequence; identical to SEQ ID NO: 74
  Synthetic
  misc_feature: 3 consecutive nucleotides at 5' and 3' end modified with 2'-OMe and a 3' PS linkage

SEQ ID NO: 175 - RNA, 94 nt, Artificial Sequence; identical to SEQ ID NO: 75
  Synthetic
  misc_feature: 3 consecutive nucleotides at 5' and 3' end modified with 2'-OMe and a 3' PS linkage

SEQ ID NO: 176 - RNA, 82 nt, Artificial Sequence; identical to SEQ ID NO: 76
  Synthetic
  misc_feature: 3 consecutive nucleotides at 5' and 3' end modified with 2'-OMe and a 3' PS linkage

SEQ ID NO: 177 - RNA, 84 nt, Artificial Sequence; identical to SEQ ID NO: 77
  Synthetic
  misc_feature: 3 consecutive nucleotides at 5' and 3' end modified with 2'-OMe and a 3' PS linkage

SEQ ID NO: 178 - RNA, 86 nt, Artificial Sequence; identical to SEQ ID NO: 78
  Synthetic
  misc_feature: 3 consecutive nucleotides at 5' and 3' end modified with 2'-OMe and a 3' PS linkage

SEQ ID NO: 179 - RNA, 92 nt, Artificial Sequence; identical to SEQ ID NO: 79
  Synthetic
  misc_feature: 3 consecutive nucleotides at 5' and 3' end modified with 2'-OMe and a 3' PS linkage

SEQ ID NO: 180 - RNA, 88 nt, Artificial Sequence; identical to SEQ ID NO: 80
  Synthetic
  misc_feature: 3 consecutive nucleotides at 5' and 3' end modified with 2'-OMe and a 3' PS linkage

SEQ ID NO: 181 - RNA, 90 nt, Artificial Sequence; identical to SEQ ID NO: 7
  Synthetic
  misc_feature: 3 consecutive nucleotides at 5' and 3' end modified with 2'-OMe and a 3' PS linkage; plus some nucleotides mid sequence modified with 2'-OMe

SEQ ID NO: 182 - RNA, 89 nt, Artificial Sequence; identical to SEQ ID NO: 8
  Synthetic
  misc_feature: 3 consecutive nucleotides at 5' and 3' end modified with 2'-OMe and a 3' PS linkage; plus some nucleotides mid sequence modified with 2'-OMe

SEQ ID NO: 183 - RNA, 88 nt, Artificial Sequence; identical to SEQ ID NO: 11
  Synthetic
  misc_feature: 3 consecutive nucleotides at 5' and 3' end modified with 2'-OMe and a 3' PS linkage; plus some nucleotides mid sequence modified with 2'-OMe

SEQ ID NO: 184 - RNA, 88 nt, Artificial Sequence; identical to SEQ ID NO: 12
  Synthetic
  misc_feature: 3 consecutive nucleotides at 5' and 3' end modified with 2'-OMe and a 3' PS linkage; plus some nucleotides mid sequence modified with 2'-OMe

SEQ ID NO: 185 - RNA, 87 nt, Artificial Sequence; identical to SEQ ID NO: 85
  Synthetic
  misc_feature: 3 consecutive nucleotides at 5' and 3' end modified with 2'-OMe and a 3' PS linkage

SEQ ID NO: 186 - RNA, 86 nt, Artificial Sequence; identical to SEQ ID NO: 86
  Synthetic
  misc_feature: 3 consecutive nucleotides at 5' and 3' end modified with 2'-OMe and a 3' PS linkage

SEQ ID NO: 187 - RNA, 84 nt, Artificial Sequence; identical to SEQ ID NO: 87
  Synthetic
  misc_feature: 3 consecutive nucleotides at 5' and 3' end modified with 2'-OMe and a 3' PS linkage

SEQ ID NO: 188 - RNA, 83 nt, Artificial Sequence; identical to SEQ ID NO: 88
  Synthetic
  misc_feature: 3 consecutive nucleotides at 5' and 3' end modified with 2'-OMe and a 3' PS linkage

SEQ ID NO: 189 - RNA, 84 nt, Artificial Sequence; identical to SEQ ID NO: 23
  Synthetic
  misc_feature: 3 consecutive nucleotides at 5' and 3' end modified with 2'-OMe and a 3' PS linkage; plus some nucleotides mid sequence modified with 2'-OMe

SEQ ID NO: 190 - RNA, 86 nt, Artificial Sequence; identical to SEQ ID NO: 90
  Synthetic
  misc_feature: 3 consecutive nucleotides at 5' and 3' end modified with 2'-OMe and a 3' PS linkage; plus some nucleotides mid sequence modified with 2'-OMe

SEQ ID NO: 191 - RNA, 100 nt, Artificial Sequence; identical to SEQ ID NO: 91
  Synthetic
  misc_feature: 3 consecutive nucleotides at 5' and 3' end modified with 2'-OMe and a 3' PS linkage; plus some nucleotides mid sequence modified with 2'-OMe

SEQ ID NO: 192 - RNA, 100 nt, Artificial Sequence; identical to SEQ ID NO: 91
  Synthetic
  misc_feature: 3 consecutive nucleotides at 5' and 3' end modified with 2'-OMe and a 3' PS linkage

SEQ ID NO: 193 - RNA, 100 nt, Artificial Sequence; identical to SEQ ID NO: 91
  Synthetic
  misc_feature: 3 consecutive nucleotides at 5' and 3' end modified with 2'-OMe and a 3' PS linkage; plus some nucleotides mid sequence modified with 2'-OMe or 2'-fluoro

SEQ ID NO: 194 - RNA, 88 nt, Artificial Sequence; identical to SEQ ID NO: 80
  Synthetic
  misc_feature: 3 consecutive nucleotides at 5' and 3' end modified with 2'-OMe and a 3' PS linkage; plus some nucleotides mid sequence modified with 2'-OMe

SEQ ID NO: 195 - RNA, 88 nt, Artificial Sequence; identical to SEQ ID NO: 80
  Synthetic
  misc_feature: 3 consecutive nucleotides at 5' and 3' end modified with 2'-OMe and a 3' PS linkage; plus some nucleotides mid sequence modified with 2'-OMe or 2'-fluoro

SEQ ID NO: 196 - RNA, 84 nt, Artificial Sequence; identical to SEQ ID NO: 96
  Synthetic
  misc_feature: 3 consecutive nucleotides at 5' and 3' end modified with 2'-OMe and a 3' PS linkage; plus some nucleotides mid sequence modified with 2'-OMe

SEQ ID NO: 197 - RNA, 80 nt, Artificial Sequence; identical to SEQ ID NO: 97
  Synthetic
  misc_feature: 3 consecutive nucleotides at 5' and 3' end modified with 2'-OMe and a 3' PS linkage; plus some nucleotides mid sequence modified with 2'-OMe

SEQ ID NO: 198 - RNA, 100 nt, Artificial Sequence; identical to SEQ ID NO: 98
  Synthetic
  misc_feature: 3 consecutive nucleotides at 5' and 3' end modified with 2'-OMe and a 3' PS linkage; plus some nucleotides mid sequence modified with 2'-OMe

SEQ ID NO: 199-200 - skipped (2 entries)

SEQ ID NO: 201 - RNA, 68 nt, Artificial Sequence
  Synthetic
guuuuagagcuagaaauagcaaguuaaaauaaggcuaguccguuaucaacuaagcaccgagucggugc

SEQ ID NO: 202 - RNA, 68 nt, Artificial Sequence
  Synthetic
guuuuagagcuagaaauagcaaguuaaaauaaggcuaguccguuaucaacucagcaccgagucggugc

SEQ ID NO: 203 - RNA, 68 nt, Artificial Sequence
  Synthetic
guuuuagagcuagaaauagcaaguuaaaauaaggcuaguccguuauccacuuggcaccgagucggugc

SEQ ID NO: 204 - RNA, 68 nt, Artificial Sequence
  Synthetic
guuuuagagcuagaaauagcaaguuaaaauacggcuaguccguuaucaacuuggcaccgagucggugc

SEQ ID NO: 205 - RNA, 70 nt, Artificial Sequence
  Synthetic
guuuuagagcuagaaauagcaaguuaaaauaaggcuaguccguuaucaagagcuggcaccgagucggugc

SEQ ID NO: 206 - RNA, 70 nt, Artificial Sequence
  Synthetic
guuuuagagcuagaaauagcaaguuaaaauaaggcuaguccguuaucaagaaauggcaccgagucggugc

SEQ ID NO: 207 - RNA, 70 nt, Artificial Sequence
  Synthetic
guuuuagagcuagaaauagcaaguuaaaauaaggcuaguccguuaucacgaaagggcaccgagucggugc

SEQ ID NO: 208 - RNA, 69 nt, Artificial Sequence
  Synthetic
guuuuagagcuagaaauagcaaguuaaaauaaggcuaguccguuaucaaaaauggcaccgagucggugc

SEQ ID NO: 209 - RNA, 69 nt, Artificial Sequence
  Synthetic
guuuuagagcuagaaauagcaaguuaaaauaaggcuaguccguuaucaaaaguggcaccgagucggugc

SEQ ID NO: 210 - RNA, 69 nt, Artificial Sequence
  Synthetic
guuuuagagcuagaaauagcaaguuaaaauaaggcuaguccguuaucaacaguggcaccgagucggugc

SEQ ID NO: 211 - RNA, 68 nt, Artificial Sequence
  Synthetic
guuuuagagcuagaaauagcaaguuaaaauaaggcuaguccguuaucacaagggcaccgagucggugc

SEQ ID NO: 212 - RNA, 68 nt, Artificial Sequence
  Synthetic
guuuuagagcuagaaauagcaaguuaaaauaaggcuaguccguuaucaaaauggcaccgagucggugc

SEQ ID NO: 213 - RNA, 66 nt, Artificial Sequence
  Synthetic
guuuuagagcuagaaauagcaaguuaaaauaaggcuaguccguuaucaaaggcaccgagucggugc

SEQ ID NO: 214 - RNA, 66 nt, Artificial Sequence
  Synthetic
guuuuagagcuagaaauagcaaguuaaaauaaggcuaguccguuaucaagggcaccgagucggugc

SEQ ID NO: 215 - RNA, 64 nt, Artificial Sequence
  Synthetic
guuuuagagcuagaaauagcaaguuaaaauaaggcuaguccguuaucaggcaccgagucggugc

SEQ ID NO: 216 - RNA, 67 nt, Artificial Sequence
  Synthetic
guuuuagagcuagaauagcaaguuaaaauaaggcuaguccguuaucaacuuggcaccgagucggugc

SEQ ID NO: 217 - RNA, 67 nt, Artificial Sequence
  Synthetic
guuuuagagcgcaaagcgcaaguuaaaauaaggcuaguccguuaucaacuuggcaccgagucggugc

SEQ ID NO: 218 - RNA, 67 nt, Artificial Sequence
  Synthetic
guuuuagagcgcgaagcgcaaguuaaaauaaggcuaguccguuaucaacuuggcaccgagucggugc

SEQ ID NO: 219 - RNA, 67 nt, Artificial Sequence
  Synthetic
guuuuagagcggaaacgcaaguuaaaauaaggcuaguccguuaucaacuuggcaccgagucggugcu

SEQ ID NO: 220 - RNA, 66 nt, Artificial Sequence
  Synthetic
guuuuagagcggaaacgcaaguuaaaauaaggcuaguccguuaucaacuuggcaccgagucggugc

SEQ ID NO: 221 - RNA, 66 nt, Artificial Sequence
  Synthetic
guuuuagagccgaaaggcaaguuaaaauaaggcuaguccguuaucaacuuggcaccgagucggugc

SEQ ID NO: 222 - RNA, 66 nt, Artificial Sequence
  Synthetic
guuuuagagcugaaaagcaaguuaaaauaaggcuaguccguuaucaacuuggcaccgagucggugc

SEQ ID NO: 223 - RNA, 64 nt, Artificial Sequence
  Synthetic
guuuuagagcgaaagcaaguuaaaauaaggcuaguccguuaucaacuuggcaccgagucggugc

SEQ ID NO: 224 - RNA, 63 nt, Artificial Sequence
  Synthetic
guuuuagagcgaagcaaguuaaaauaaggcuaguccguuaucaacuuggcaccgagucggugc

SEQ ID NO: 225 - RNA, 63 nt, Artificial Sequence
  Synthetic
guuuuagagcaaagcaaguuaaaauaaggcuaguccguuaucaacuuggcaccgagucggugc

SEQ ID NO: 226 - RNA, 62 nt, Artificial Sequence
  Synthetic
guuuuagaggaaacaaguuaaaauaaggcuaguccguuaucaacuuggcaccgagucggugc

SEQ ID NO: 227 - RNA, 62 nt, Artificial Sequence
  Synthetic
guuuuagagcaagcaaguuaaaauaaggcuaguccguuaucaacuuggcaccgagucggugc

SEQ ID NO: 228 - RNA, 62 nt, Artificial Sequence
  Synthetic
guuuuagagcgagcaaguuaaaauaaggcuaguccguuaucaacuuggcaccgagucggugc

SEQ ID NO: 229 - RNA, 60 nt, Artificial Sequence
  Synthetic
guuuuagagcgcaaguuaaaauaaggcuaguccguuaucaacuuggcaccgagucggugc

SEQ ID NO: 230 - RNA, 60 nt, Artificial Sequence
  Synthetic
guuuuagagaacaaguuaaaauaaggcuaguccguuaucaacuuggcaccgagucggugc

SEQ ID NO: 231 - RNA, 59 nt, Artificial Sequence
  Synthetic
guuuuagagacaaguuaaaauaaggcuaguccguuaucaacuuggcaccgagucggugc

SEQ ID NO: 232 - RNA, 58 nt, Artificial Sequence
  Synthetic
guuuuagagcaaguuaaaauaaggcuaguccguuaucaacuuggcaccgagucggugc

SEQ ID NO: 233 - RNA, 58 nt, Artificial Sequence
  Synthetic
guuuuagaaaaaguuaaaauaaggcuaguccguuaucaacuuggcaccgagucggugc

SEQ ID NO: 234 - RNA, 57 nt, Artificial Sequence
  Synthetic
guuuuagaaaaguuaaaauaaggcuaguccguuaucaacuuggcaccgagucggugc

SEQ ID NO: 235 - RNA, 67 nt, Artificial Sequence
  Synthetic
guuuuagagcuagaaauagcaaguuaaaauaaggcuaguccguuaucaacuuggcaccgagucggug

SEQ ID NO: 236 - RNA, 66 nt, Artificial Sequence
  Synthetic
guuuuagagcuagaaauagcaaguuaaaauaaggcuaguccguuaucaacuuggcaccgagucggu

SEQ ID NO: 237 - RNA, 65 nt, Artificial Sequence
  Synthetic
guuuuagagcuagaaauagcaaguuaaaauaaggcuaguccguuaucaacuuggcaccgagucgg

SEQ ID NO: 238 - RNA, 64 nt, Artificial Sequence
  Synthetic
guuuuagagcuagaaauagcaaguuaaaauaaggcuaguccguuaucaacuuggcaccgagucg

SEQ ID NO: 239 - RNA, 63 nt, Artificial Sequence
  Synthetic
guuuuagagcuagaaauagcaaguuaaaauaaggcuaguccguuaucaacuuggcaccgaguc

SEQ ID NO: 240 - RNA, 62 nt, Artificial Sequence
  Synthetic
guuuuagagcuagaaauagcaaguuaaaauaaggcuaguccguuaucaacuuggcaccgagu

SEQ ID NO: 241 - RNA, 62 nt, Artificial Sequence
  Synthetic
guuuuagagcgaaagcaaguuaaaauaaggcuaguccguuaucacuggcaccgagucggugc

SEQ ID NO: 242 - RNA, 60 nt, Artificial Sequence
  Synthetic
guuuuagagcgaaagcaaguuaaaauaaggcuaguccguuaucaggcaccgagucggugc

SEQ ID NO: 243 - RNA, 60 nt, Artificial Sequence
  Synthetic
guuuuagagaaaaaguuaaaauaaggcuaguccguuaucaacuuggcaccgagucggugc

SEQ ID NO: 244 - RNA, 60 nt, Artificial Sequence
  Synthetic
guuuuagaggaaacaaguuaaaauaaggcuaguccguuaucaauggcaccgagucggugc

SEQ ID NO: 245 - RNA, 58 nt, Artificial Sequence
  Synthetic
guuuuagagaaaaaguuaaaauaaggcuaguccguuaucaauggcaccgagucggugc

SEQ ID NO: 246 - RNA, 60 nt, Artificial Sequence
  Synthetic
guuuuagaggaaacaaguuaaaauaaggcuaguccguuaucacuggcaccgagucggugc

SEQ ID NO: 247 - RNA, 56 nt, Artificial Sequence
  Synthetic
guuuuagagaaaaaguuaaaauaaggcuaguccguuaucaggcaccgagucggugc

SEQ ID NO: 248 - RNA, 66 nt, Artificial Sequence
  Synthetic
guuuuagagcgaaagcaaguuaaaauaaggcuaguccguuaucaagcuauggcaccgagucggugc

SEQ ID NO: 249 - RNA, 67 nt, Artificial Sequence
  Synthetic
guuuuagagcuagaaauagcaaguuaaaauaaggcaguccguuaucaacuuggcaccgagucggugc

SEQ ID NO: 250 - RNA, 67 nt, Artificial Sequence
  Synthetic
guuuuagagcuagaaauagcaaguuaaaauaaggcuguccguuaucaacuuggcaccgagucggugc

SEQ ID NO: 251 - RNA, 66 nt, Artificial Sequence
  Synthetic
guuuuagagcuagaaauagcaaguuaaaauaaggcguccguuaucaacuuggcaccgagucggugc

SEQ ID NO: 252 - RNA, 66 nt, Artificial Sequence
  Synthetic
guuuuagagcuagaaauagcaaguuaaaauaagguauccguuaucaacuuggcaccgagucggugc

SEQ ID NO: 253 - RNA, 65 nt, Artificial Sequence
  Synthetic
guuuuagagcuagaaauagcaaguuaaaauaagguuccguuaucaacuuggcaccgagucggugc

SEQ ID NO: 254 - RNA, 65 nt, Artificial Sequence
  Synthetic
guuuuagagcuagaaauagcaaguuaaaauaaggauccguuaucaacuuggcaccgagucggugc

SEQ ID NO: 255 - RNA, 68 nt, Artificial Sequence
  Synthetic
guuuucgagcuagaaauagcaagugaaaauaaggcuaguccguuaucaacuuggcaccgagucggugc

SEQ ID NO: 256 - RNA, 68 nt, Artificial Sequence
  Synthetic
guuuuugagcuagaaauagcaaguaaaaauaaggcuaguccguuaucaacuuggcaccgagucggugc

SEQ ID NO: 257 - RNA, 68 nt, Artificial Sequence
  Synthetic
guuuuagagcgagaaaucgcaaguuaaaauaaggcuaguccguuaucaacuuggcaccgagucggugc

SEQ ID NO: 258 - RNA, 68 nt, Artificial Sequence
  Synthetic
guuuuagagcuagaaauagcgaguuaaaauaaggcuaguccguuaucaacuuggcaccgagucggugc

SEQ ID NO: 259 - RNA, 68 nt, Artificial Sequence
  Synthetic
guuuuagagcuagaaauagccgguuaaaauaaggcuaguccguuaucaacuuggcaccgagucggugc

SEQ ID NO: 260 - RNA, 68 nt, Artificial Sequence
  Synthetic
guuuuagagcuagaaauagcaaguuaaaaugaggcuaguccguuaucaacuuggcaccgagucggugc

SEQ ID NO: 261 - RNA, 68 nt, Artificial Sequence
  Synthetic
guuuuagagcuagaaauagcaaguuaaaauaaggcugguccguuaucaacuuggcaccgagucggugc

SEQ ID NO: 262 - RNA, 68 nt, Artificial Sequence
  Synthetic
guuuuagagcuagaaauagcaaguuaaaauaaggcucguccguuaucaacuuggcaccgagucggugc

SEQ ID NO: 263 - RNA, 68 nt, Artificial Sequence
  Synthetic
guuuuagagcuagaaauagcaaguuaaaauaaggcuuguccguuaucaacuuggcaccgagucggugc

SEQ ID NO: 264 - RNA, 68 nt, Artificial Sequence
  Synthetic
guuuuagagcuagaaauagcaaguuaaaauaaggcuaguccguugucaacuuggcaccgagucggugc

SEQ ID NO: 265 - RNA, 68 nt, Artificial Sequence
  Synthetic
guuuuagagcuagaaauagcaaguuaaaauaaggcuaguccguucucaacuuggcaccgagucggugc

SEQ ID NO: 266 - RNA, 68 nt, Artificial Sequence
  Synthetic
guuuuagagcuagaaauagcaaguuaaaauaaggcuaguccguuuucaacuuggcaccgagucggugc

SEQ ID NO: 267 - RNA, 68 nt, Artificial Sequence
  Synthetic
guuuuagagcuagaaauagcaaguuaaaauaaggcuaguccguuaugaacuuggcaccgagucggugc

SEQ ID NO: 268 - RNA, 68 nt, Artificial Sequence
  Synthetic
guuuuagagcuagaaauagcaaguuaaaauaaggcuaguccguuaucaacuugggaccgagucggucc

SEQ ID NO: 269 - RNA, 68 nt, Artificial Sequence
  Synthetic
guuuuagagcuagaaauagcaaguuaaaauaaggcuaguccguuaucaacuuggaaccgagucgguuc

SEQ ID NO: 270 - RNA, 68 nt, Artificial Sequence
  Synthetic
guuuucgagcgagaaaucgcgagugaaaaugaggcugguccguugugaacuuggaaccgagucgguuc

SEQ ID NO: 271 - RNA, 68 nt, Artificial Sequence
  Synthetic
guuuuugagcgagaaaucgcaaguaaaaauaaggcucguccguucugaacuuggaaccgagucgguuc

SEQ ID NO: 272 - RNA, 68 nt, Artificial Sequence
  Synthetic
guuucggagccggaaacggcgagucgaaaugaggcugguccguugucggcucggaaccgagucgguuc

SEQ ID NO: 273 - RNA, 68 nt, Artificial Sequence
  Synthetic
guuuuagagcuagaaauagcaaguuaaaauaaggcuaguccguuaucaacuuggcaccgagucggugc

SEQ ID NO: 274 - RNA, 68 nt, Artificial Sequence; identical to SEQ ID NO: 273
  Synthetic

SEQ ID NO: 275 - RNA, 68 nt, Artificial Sequence; identical to SEQ ID NO: 273
  Synthetic

SEQ ID NO: 276 - RNA, 68 nt, Artificial Sequence; identical to SEQ ID NO: 273
  Synthetic

SEQ ID NO: 277 - RNA, 68 nt, Artificial Sequence; identical to SEQ ID NO: 273
  Synthetic

SEQ ID NO: 278 - RNA, 68 nt, Artificial Sequence; identical to SEQ ID NO: 273
  Synthetic

SEQ ID NO: 279 - RNA, 68 nt, Artificial Sequence; identical to SEQ ID NO: 273
  Synthetic

SEQ ID NO: 280 - RNA, 68 nt, Artificial Sequence; identical to SEQ ID NO: 273
  Synthetic

SEQ ID NO: 281 - RNA, 70 nt, Artificial Sequence; identical to SEQ ID NO: 207
  Synthetic

SEQ ID NO: 282 - RNA, 69 nt, Artificial Sequence; identical to SEQ ID NO: 208
  Synthetic

SEQ ID NO: 283 - RNA, 68 nt, Artificial Sequence; identical to SEQ ID NO: 211
  Synthetic

SEQ ID NO: 284 - RNA, 68 nt, Artificial Sequence; identical to SEQ ID NO: 212
  Synthetic

SEQ ID NO: 285 - RNA, 67 nt, Artificial Sequence
  Synthetic
guuuuagagcgcgaagcgcaaguuaaaauaaggcuaguccguuaucaaaauggcaccgagucggugc

SEQ ID NO: 286 - RNA, 66 nt, Artificial Sequence
  Synthetic
guuuuagagcugaaaagcaaguuaaaauaaggcuaguccguuaucaaaauggcaccgagucggugc

SEQ ID NO: 287 - RNA, 64 nt, Artificial Sequence
  Synthetic
guuuuagagcgaaagcaaguuaaaauaaggcuaguccguuaucaaaauggcaccgagucggugc

SEQ ID NO: 288 - RNA, 63 nt, Artificial Sequence
  Synthetic
guuuuagagcaaagcaaguuaaaauaaggcuaguccguuaucaaaauggcaccgagucggugc

SEQ ID NO: 289 - RNA, 64 nt, Artificial Sequence; identical to SEQ ID NO: 223
  Synthetic

SEQ ID NO: 290 - RNA, 66 nt, Artificial Sequence
  Synthetic
guuuuagagcgaaagcaaguuaaaauaaggcuaguccguuaucaagaaauggcaccgagucggugc

SEQ ID NO: 291 - RNA, 70 nt, Artificial Sequence; identical to SEQ ID NO: 207
  Synthetic

SEQ ID NO: 292 - RNA, 68 nt, Artificial Sequence; identical to SEQ ID NO: 212
  Synthetic

SEQ ID NO: 293 - RNA, 70 nt, Artificial Sequence; identical to SEQ ID NO: 207
  Synthetic

SEQ ID NO: 294 - RNA, 68 nt, Artificial Sequence; identical to SEQ ID NO: 212
  Synthetic

SEQ ID NO: 295-300 - skipped (6 entries)

SEQ ID NO: 301 - RNA, 68 nt, Artificial Sequence; identical to SEQ ID NO: 201
  Synthetic
  misc_feature: 3 consecutive nucleotides at 3' end modified with 2'-OMe and a 3' PS linkage

SEQ ID NO: 302 - RNA, 68 nt, Artificial Sequence; identical to SEQ ID NO: 202
  Synthetic
  misc_feature: 3 consecutive nucleotides at 3' end modified with 2'-OMe and a 3' PS linkage

SEQ ID NO: 303 - RNA, 68 nt, Artificial Sequence; identical to SEQ ID NO: 203
  Synthetic
  misc_feature: 3 consecutive nucleotides at 3' end modified with 2'-OMe and a 3' PS linkage

SEQ ID NO: 304 - RNA, 68 nt, Artificial Sequence; identical to SEQ ID NO: 204
  Synthetic
  misc_feature: 3 consecutive nucleotides at 3' end modified with 2'-OMe and a 3' PS linkage

SEQ ID NO: 305 - RNA, 70 nt, Artificial Sequence; identical to SEQ ID NO: 205
  Synthetic
  misc_feature: 3 consecutive nucleotides at 3' end modified with 2'-OMe and a 3' PS linkage

SEQ ID NO: 306 - RNA, 70 nt, Artificial Sequence; identical to SEQ ID NO: 206
  Synthetic
  misc_feature: 3 consecutive nucleotides at 3' end modified with 2'-OMe and a 3' PS linkage

SEQ ID NO: 307 - RNA, 70 nt, Artificial Sequence; identical to SEQ ID NO: 207
  Synthetic
  misc_feature: 3 consecutive nucleotides at 3' end modified with 2'-OMe and a 3' PS linkage

SEQ ID NO: 308 - RNA, 69 nt, Artificial Sequence; identical to SEQ ID NO: 208
  Synthetic
  misc_feature: 3 consecutive nucleotides at 3' end modified with 2'-OMe and a 3' PS linkage

SEQ ID NO: 309 - RNA, 69 nt, Artificial Sequence; identical to SEQ ID NO: 209
  Synthetic
  misc_feature: 3 consecutive nucleotides at 3' end modified with 2'-OMe and a 3' PS linkage

SEQ ID NO: 310 - RNA, 69 nt, Artificial Sequence; identical to SEQ ID NO: 210
  Synthetic
  misc_feature: 3 consecutive nucleotides at 3' end modified with 2'-OMe and a 3' PS linkage

SEQ ID NO: 311 - RNA, 68 nt, Artificial Sequence; identical to SEQ ID NO: 211
  Synthetic
  misc_feature: 3 consecutive nucleotides at 3' end modified with 2'-OMe and a 3' PS linkage

SEQ ID NO: 312 - RNA, 68 nt, Artificial Sequence; identical to SEQ ID NO: 212
  Synthetic
  misc_feature: 3 consecutive nucleotides at 3' end modified with 2'-OMe and a 3' PS linkage

SEQ ID NO: 313 - RNA, 66 nt, Artificial Sequence; identical to SEQ ID NO: 213
  Synthetic
  misc_feature: 3 consecutive nucleotides at 3' end modified with 2'-OMe and a 3' PS linkage

SEQ ID NO: 314 - RNA, 66 nt, Artificial Sequence; identical to SEQ ID NO: 214
  Synthetic
  misc_feature: 3 consecutive nucleotides at 3' end modified with 2'-OMe and a 3' PS linkage

SEQ ID NO: 315 - RNA, 64 nt, Artificial Sequence; identical to SEQ ID NO: 215
  Synthetic
  misc_feature: 3 consecutive nucleotides at 3' end modified with 2'-OMe and a 3' PS linkage

SEQ ID NO: 316 - RNA, 67 nt, Artificial Sequence; identical to SEQ ID NO: 216
  Synthetic
  misc_feature: 3 consecutive nucleotides at 3' end modified with 2'-OMe and a 3' PS linkage

SEQ ID NO: 317 - RNA, 67 nt, Artificial Sequence; identical to SEQ ID NO: 217
  Synthetic
  misc_feature: 3 consecutive nucleotides at 3' end modified with 2'-OMe and a 3' PS linkage

SEQ ID NO: 318 - RNA, 67 nt, Artificial Sequence; identical to SEQ ID NO: 218
  Synthetic
  misc_feature: 3 consecutive nucleotides at 3' end modified with 2'-OMe and a 3' PS linkage

SEQ ID NO: 319 - RNA, 67 nt, Artificial Sequence; identical to SEQ ID NO: 219
  Synthetic
  misc_feature: 3 consecutive nucleotides at 3' end modified with 2'-OMe and a 3' PS linkage

SEQ ID NO: 320 - RNA, 66 nt, Artificial Sequence; identical to SEQ ID NO: 220
  Synthetic
  misc_feature: 3 consecutive nucleotides at 3' end modified with 2'-OMe and a 3' PS linkage

SEQ ID NO: 321 - RNA, 66 nt, Artificial Sequence; identical to SEQ ID NO: 221
  Synthetic
  misc_feature: 3 consecutive nucleotides at 3' end modified with 2'-OMe and a 3' PS linkage

SEQ ID NO: 322 - RNA, 66 nt, Artificial Sequence; identical to SEQ ID NO: 222
  Synthetic
  misc_feature: 3 consecutive nucleotides at 3' end modified with 2'-OMe and a 3' PS linkage

SEQ ID NO: 323 - RNA, 64 nt, Artificial Sequence; identical to SEQ ID NO: 223
  Synthetic
  misc_feature: 3 consecutive nucleotides at 3' end modified with 2'-OMe and a 3' PS linkage

SEQ ID NO: 324 - RNA, 63 nt, Artificial Sequence; identical to SEQ ID NO: 224
  Synthetic
  misc_feature: 3 consecutive nucleotides at 3' end modified with 2'-OMe and a 3' PS linkage

SEQ ID NO: 325 - RNA, 63 nt, Artificial Sequence; identical to SEQ ID NO: 225
  Synthetic
  misc_feature: 3 consecutive nucleotides at 3' end modified with 2'-OMe and a 3' PS linkage

SEQ ID NO: 326 - RNA, 62 nt, Artificial Sequence; identical to SEQ ID NO: 226
  Synthetic
  misc_feature: 3 consecutive nucleotides at 3' end modified with 2'-OMe and a 3' PS linkage

SEQ ID NO: 327 - RNA, 62 nt, Artificial Sequence; identical to SEQ ID NO: 227
  Synthetic
  misc_feature: 3 consecutive nucleotides at 3' end modified with 2'-OMe and a 3' PS linkage

SEQ ID NO: 328 - RNA, 62 nt, Artificial Sequence; identical to SEQ ID NO: 228
  Synthetic
  misc_feature: 3 consecutive nucleotides at 3' end modified with 2'-OMe and a 3' PS linkage

SEQ ID NO: 329 - RNA, 60 nt, Artificial Sequence; identical to SEQ ID NO: 229
  Synthetic
  misc_feature: 3 consecutive nucleotides at 3' end modified with 2'-OMe and a 3' PS linkage

SEQ ID NO: 330 - RNA, 60 nt, Artificial Sequence; identical to SEQ ID NO: 230
  Synthetic
  misc_feature: 3 consecutive nucleotides at 3' end modified with 2'-OMe and a 3' PS linkage

SEQ ID NO: 331 - RNA, 59 nt, Artificial Sequence; identical to SEQ ID NO: 231
  Synthetic
  misc_feature: 3 consecutive nucleotides at 3' end modified with 2'-OMe and a 3' PS linkage

SEQ ID NO: 332 - RNA, 58 nt, Artificial Sequence; identical to SEQ ID NO: 232
  Synthetic
  misc_feature: 3 consecutive nucleotides at 3' end modified with 2'-OMe and a 3' PS linkage

SEQ ID NO: 333 - RNA, 58 nt, Artificial Sequence; identical to SEQ ID NO: 233
  Synthetic
  misc_feature: 3 consecutive nucleotides at 3' end modified with 2'-OMe and a 3' PS linkage

SEQ ID NO: 334 - RNA, 57 nt, Artificial Sequence; identical to SEQ ID NO: 234
  Synthetic
  misc_feature: 3 consecutive nucleotides at 3' end modified with 2'-OMe and a 3' PS linkage

SEQ ID NO: 335 - RNA, 67 nt, Artificial Sequence; identical to SEQ ID NO: 235
  Synthetic
  misc_feature: 3 consecutive nucleotides at 3' end modified with 2'-OMe and a 3' PS linkage

SEQ ID NO: 336 - RNA, 66 nt, Artificial Sequence; identical to SEQ ID NO: 236
  Synthetic
  misc_feature: 3 consecutive nucleotides at 3' end modified with 2'-OMe and a 3' PS linkage

SEQ ID NO: 337 - RNA, 65 nt, Artificial Sequence; identical to SEQ ID NO: 237
  Synthetic
  misc_feature: 3 consecutive nucleotides at 3' end modified with 2'-OMe and a 3' PS linkage

SEQ ID NO: 338 - RNA, 64 nt, Artificial Sequence; identical to SEQ ID NO: 238
  Synthetic
  misc_feature: 3 consecutive nucleotides at 3' end modified with 2'-OMe and a 3' PS linkage

SEQ ID NO: 339 - RNA, 63 nt, Artificial Sequence; identical to SEQ ID NO: 239
  Synthetic
  misc_feature: 3 consecutive nucleotides at 3' end modified with 2'-OMe and a 3' PS linkage

SEQ ID NO: 340 - RNA, 62 nt, Artificial Sequence; identical to SEQ ID NO: 240
  Synthetic
  misc_feature: 3 consecutive nucleotides at 3' end modified with 2'-OMe and a 3' PS linkage

SEQ ID NO: 341 - RNA, 62 nt, Artificial Sequence; identical to SEQ ID NO: 241
  Synthetic
  misc_feature: 3 consecutive nucleotides at 3' end modified with 2'-OMe and a 3' PS linkage

SEQ ID NO: 342 - RNA, 60 nt, Artificial Sequence; identical to SEQ ID NO: 242
  Synthetic
  misc_feature: 3 consecutive nucleotides at 3' end modified with 2'-OMe and a 3' PS linkage

SEQ ID NO: 343 - RNA, 60 nt, Artificial Sequence; identical to SEQ ID NO: 243
  Synthetic
  misc_feature: 3 consecutive nucleotides at 3' end modified with 2'-OMe and a 3' PS linkage

SEQ ID NO: 344 - RNA, 60 nt, Artificial Sequence; identical to SEQ ID NO: 244
  Synthetic
  misc_feature: 3 consecutive nucleotides at 3' end modified with 2'-OMe and a 3' PS linkage

SEQ ID NO: 345 - RNA, 58 nt, Artificial Sequence; identical to SEQ ID NO: 245
  Synthetic
  misc_feature: 3 consecutive nucleotides at 3' end modified with 2'-OMe and a 3' PS linkage

SEQ ID NO: 346 - RNA, 60 nt, Artificial Sequence; identical to SEQ ID NO: 246
  Synthetic
  misc_feature: 3 consecutive nucleotides at 3' end modified with 2'-OMe and a 3' PS linkage

SEQ ID NO: 347 - RNA, 56 nt, Artificial Sequence; identical to SEQ ID NO: 247
  Synthetic
  misc_feature: 3 consecutive nucleotides at 3' end modified with 2'-OMe and a 3' PS linkage

SEQ ID NO: 348 - RNA, 66 nt, Artificial Sequence; identical to SEQ ID NO: 248
  Synthetic
  misc_feature: 3 consecutive nucleotides at 3' end modified with 2'-OMe and a 3' PS linkage

SEQ ID NO: 349 - RNA, 67 nt, Artificial Sequence; identical to SEQ ID NO: 249
  Synthetic
  misc_feature: 3 consecutive nucleotides at 3' end modified with 2'-OMe and a 3' PS linkage

SEQ ID NO: 350 - RNA, 67 nt, Artificial Sequence; identical to SEQ ID NO: 250
  Synthetic
  misc_feature: 3 consecutive nucleotides at 3' end modified with 2'-OMe and a 3' PS linkage

SEQ ID NO: 351 - RNA, 66 nt, Artificial Sequence; identical to SEQ ID NO: 251
  Synthetic
  misc_feature: 3 consecutive nucleotides at 3' end modified with 2'-OMe and a 3' PS linkage

SEQ ID NO: 352 - RNA, 66 nt, Artificial Sequence; identical to SEQ ID NO: 252
  Synthetic
  misc_feature: 3 consecutive nucleotides at 3' end modified with 2'-OMe and a 3' PS linkage

SEQ ID NO: 353 - RNA, 65 nt, Artificial Sequence; identical to SEQ ID NO: 253
  Synthetic
  misc_feature: 3 consecutive nucleotides at 3' end modified with 2'-OMe and a 3' PS linkage

SEQ ID NO: 354 - RNA, 65 nt, Artificial Sequence; identical to SEQ ID NO: 254
  Synthetic
  misc_feature: 3 consecutive nucleotides at 3' end modified with 2'-OMe and a 3' PS linkage

SEQ ID NO: 355 - RNA, 68 nt, Artificial Sequence; identical to SEQ ID NO: 255
  Synthetic
  misc_feature: 3 consecutive nucleotides at 3' end modified with 2'-OMe and a 3' PS linkage

SEQ ID NO: 356 - RNA, 68 nt, Artificial Sequence; identical to SEQ ID NO: 256
  Synthetic
  misc_feature: 3 consecutive nucleotides at 3' end modified with 2'-OMe and a 3' PS linkage

SEQ ID NO: 357 - RNA, 68 nt, Artificial Sequence; identical to SEQ ID NO: 257
  Synthetic
  misc_feature: 3 consecutive nucleotides at 3' end modified with 2'-OMe and a 3' PS linkage

SEQ ID NO: 358 - RNA, 68 nt, Artificial Sequence; identical to SEQ ID NO: 258
  Synthetic
  misc_feature: 3 consecutive nucleotides at 3' end modified with 2'-OMe and a 3' PS linkage

SEQ ID NO: 359 - RNA, 68 nt, Artificial Sequence; identical to SEQ ID NO: 259
  Synthetic
  misc_feature: 3 consecutive nucleotides at 3' end modified with 2'-OMe and a 3' PS linkage

SEQ ID NO: 360 - RNA, 68 nt, Artificial Sequence; identical to SEQ ID NO: 260
  Synthetic
  misc_feature: 3 consecutive nucleotides at 3' end modified with 2'-OMe and a 3' PS linkage

SEQ ID NO: 361 - RNA, 68 nt, Artificial Sequence; identical to SEQ ID NO: 261
  Synthetic
  misc_feature: 3 consecutive nucleotides at 3' end modified with 2'-OMe and a 3' PS linkage

SEQ ID NO: 362 - RNA, 68 nt, Artificial Sequence; identical to SEQ ID NO: 262
  Synthetic
  misc_feature: 3 consecutive nucleotides at 3' end modified with 2'-OMe and a 3' PS linkage

SEQ ID NO: 363 - RNA, 68 nt, Artificial Sequence; identical to SEQ ID NO: 263
  Synthetic
  misc_feature: 3 consecutive nucleotides at 3' end modified with 2'-OMe and a 3' PS linkage

SEQ ID NO: 364 - RNA, 68 nt, Artificial Sequence; identical to SEQ ID NO: 264
  Synthetic
  misc_feature: 3 consecutive nucleotides at 3' end modified with 2'-OMe and a 3' PS linkage

SEQ ID NO: 365 - RNA, 68 nt, Artificial Sequence; identical to SEQ ID NO: 265
  Synthetic
  misc_feature: 3 consecutive nucleotides at 3' end modified with 2'-OMe and a 3' PS linkage

SEQ ID NO: 366 - RNA, 68 nt, Artificial Sequence; identical to SEQ ID NO: 266
  Synthetic
  misc_feature: 3 consecutive nucleotides at 3' end modified with 2'-OMe and a 3' PS linkage

SEQ ID NO: 367 - RNA, 68 nt, Artificial Sequence; identical to SEQ ID NO: 267
  Synthetic
  misc_feature: 3 consecutive nucleotides at 3' end modified with 2'-OMe and a 3' PS linkage

SEQ ID NO: 368 - RNA, 68 nt, Artificial Sequence; identical to SEQ ID NO: 268
  Synthetic
  misc_feature: 3 consecutive nucleotides at 3' end modified with 2'-OMe and a 3' PS linkage

SEQ ID NO: 369 - RNA, 68 nt, Artificial Sequence; identical to SEQ ID NO: 269
  Synthetic
  misc_feature: 3 consecutive nucleotides at 3' end modified with 2'-OMe and a 3' PS linkage

SEQ ID NO: 370 - RNA, 68 nt, Artificial Sequence; identical to SEQ ID NO: 270
  Synthetic
  misc_feature: 3 consecutive nucleotides at 3' end modified with 2'-OMe and a 3' PS linkage

SEQ ID NO: 371 - RNA, 68 nt, Artificial Sequence; identical to SEQ ID NO: 271
  Synthetic
  misc_feature: 3 consecutive nucleotides at 3' end modified with 2'-OMe and a 3' PS linkage

SEQ ID NO: 372 - RNA, 68 nt, Artificial Sequence; identical to SEQ ID NO: 272
  Synthetic
  misc_feature: 3 consecutive nucleotides at 3' end modified with 2'-OMe and a 3' PS linkage

SEQ ID NO: 373 - RNA, 68 nt, Artificial Sequence; identical to SEQ ID NO: 273
  Synthetic
  misc_feature: 3 consecutive nucleotides at 3' end modified with 2'-OMe and a 3' PS linkage

SEQ ID NO: 374 - RNA, 68 nt, Artificial Sequence; identical to SEQ ID NO: 273
  Synthetic
  misc_feature: 3 consecutive nucleotides at 3' end modified with 2'-OMe and a 3' PS linkage

SEQ ID NO: 375 - RNA, 68 nt, Artificial Sequence; identical to SEQ ID NO: 273
  Synthetic
  misc_feature: 3 consecutive nucleotides at 3' end modified with 2'-OMe and a 3' PS linkage

SEQ ID NO: 376 - RNA, 68 nt, Artificial Sequence; identical to SEQ ID NO: 273
  Synthetic
  misc_feature: 3 consecutive nucleotides at 3' end modified with 2'-OMe and a 3' PS linkage

SEQ ID NO: 377 - RNA, 68 nt, Artificial Sequence; identical to SEQ ID NO: 273
  Synthetic
  misc_feature: 3 consecutive nucleotides at 3' end modified with 2'-OMe and a 3' PS linkage

SEQ ID NO: 378 - RNA, 68 nt, Artificial Sequence; identical to SEQ ID NO: 273
  Synthetic
  misc_feature: 3 consecutive nucleotides at 3' end modified with 2'-OMe and a 3' PS linkage

SEQ ID NO: 379 - RNA, 68 nt, Artificial Sequence; identical to SEQ ID NO: 273
  Synthetic
  misc_feature: 3 consecutive nucleotides at 3' end modified with 2'-OMe and a 3' PS linkage

SEQ ID NO: 380 - RNA, 68 nt, Artificial Sequence; identical to SEQ ID NO: 273
  Synthetic
  misc_feature: 3 consecutive nucleotides at 3' end modified with 2'-OMe and a 3' PS linkage

SEQ ID NO: 381 - RNA, 70 nt, Artificial Sequence; identical to SEQ ID NO: 207
  Synthetic
  misc_feature: 3 consecutive nucleotides at 3' end modified with 2'-OMe and a 3' PS linkage

SEQ ID NO: 382 - RNA, 69 nt, Artificial Sequence; identical to SEQ ID NO: 208
  Synthetic
  misc_feature: 3 consecutive nucleotides at 3' end modified with 2'-OMe and a 3' PS linkage

SEQ ID NO: 383 - RNA, 68 nt, Artificial Sequence; identical to SEQ ID NO: 211
  Synthetic
  misc_feature: 3 consecutive nucleotides at 3' end modified with 2'-OMe and a 3' PS linkage

SEQ ID NO: 384 - RNA, 68 nt, Artificial Sequence; identical to SEQ ID NO: 212
  Synthetic
  misc_feature: 3 consecutive nucleotides at 3' end modified with 2'-OMe and a 3' PS linkage

SEQ ID NO: 385 - RNA, 67 nt, Artificial Sequence; identical to SEQ ID NO: 285
  Synthetic
  misc_feature: 3 consecutive nucleotides at 3' end modified with 2'-OMe and a 3' PS linkage

SEQ ID NO: 386 - RNA, 66 nt, Artificial Sequence; identical to SEQ ID NO: 286
  Synthetic
  misc_feature: 3 consecutive nucleotides at 3' end modified with 2'-OMe and a 3' PS linkage

SEQ ID NO: 387 - RNA, 64 nt, Artificial Sequence; identical to SEQ ID NO: 287
  Synthetic
  misc_feature: 3 consecutive nucleotides at 3' end modified with 2'-OMe and a 3' PS linkage

SEQ ID NO: 388 - RNA, 63 nt, Artificial Sequence; identical to SEQ ID NO: 288
  Synthetic
  misc_feature: 3 consecutive nucleotides at 3' end modified with 2'-OMe and a 3' PS linkage

SEQ ID NO: 389 - RNA, 64 nt, Artificial Sequence; identical to SEQ ID NO: 223
  Synthetic
  misc_feature: 3 consecutive nucleotides at 3' end modified with 2'-OMe and a 3' PS linkage

SEQ ID NO: 390 - RNA, 66 nt, Artificial Sequence; identical to SEQ ID NO: 290
  Synthetic
  misc_feature: 3 consecutive nucleotides at 3' end modified with 2'-OMe and a 3' PS linkage

SEQ ID NO: 391 - RNA, 70 nt, Artificial Sequence; identical to SEQ ID NO: 207
  Synthetic
  misc_feature: 3 consecutive nucleotides at 3' end modified with 2'-OMe and a 3' PS linkage

SEQ ID NO: 392 - RNA, 68 nt, Artificial Sequence; identical to SEQ ID NO: 212
  Synthetic
  misc_feature: 3 consecutive nucleotides at 3' end modified with 2'-OMe and a 3' PS linkage

SEQ ID NO: 393 - RNA, 70 nt, Artificial Sequence; identical to SEQ ID NO: 207
  Synthetic
  misc_feature: 3 consecutive nucleotides at 3' end modified with 2'-OMe and a 3' PS linkage

SEQ ID NO: 394 - RNA, 68 nt, Artificial Sequence; identical to SEQ ID NO: 212
  Synthetic
  misc_feature: 3 consecutive nucleotides at 3' end modified with 2'-OMe and a 3' PS linkage

SEQ ID NO: 395-399 - skipped (5 entries)

SEQ ID NO: 400 - RNA, 76 nt, Artificial Sequence
  Synthetic
guuuuagagcuagaaauagcaaguuaaaauaaggcuaguccguuaucaacuugaaaaaguggcaccgagucggugc

SEQ ID NO: 401 - RNA, 96 nt, Artificial Sequence
  Synthetic
  misc_feature (1)..(28): n is a, c, g, or u
  misc_feature (9)..(28): n may or may not be present
nnnnnnnnnnnnnnnnnnnnnnnnnnnnguuuuagagcuagaaauagcaaguuaaaauaaggcuaguccguuaucaacuaagcaccgagucggugc

SEQ ID NO: 402 - RNA, 96 nt, Artificial Sequence
  Synthetic
  misc_feature (1)..(28): n is a, c, g, or u
  misc_feature (9)..(28): n may or may not be present
nnnnnnnnnnnnnnnnnnnnnnnnnnnnguuuuagagcuagaaauagcaaguuaaaauaaggcuaguccguuaucaacucagcaccgagucggugc

SEQ ID NO: 403 - RNA, 96 nt, Artificial Sequence
  Synthetic
  misc_feature (1)..(28): n is a, c, g, or u
  misc_feature (9)..(28): n may or may not be present
nnnnnnnnnnnnnnnnnnnnnnnnnnnnguuuuagagcuagaaauagcaaguuaaaauaaggcuaguccguuauccacuuggcaccgagucggugc

SEQ ID NO: 404 - RNA, 96 nt, Artificial Sequence
  Synthetic
  misc_feature (1)..(28): n is a, c, g, or u
  misc_feature (9)..(28): n may or may not be present
nnnnnnnnnnnnnnnnnnnnnnnnnnnnguuuuagagcuagaaauagcaaguuaaaauacggcuaguccguuaucaacuuggcaccgagucggugc

SEQ ID NO: 405 - RNA, 98 nt, Artificial Sequence
  Synthetic
  misc_feature (1)..(28): n is a, c, g, or u
  misc_feature (9)..(28): n may or may not be present
nnnnnnnnnnnnnnnnnnnnnnnnnnnnguuuuagagcuagaaauagcaaguuaaaauaaggcuaguccguuaucaagagcuggcaccgagucggugc

SEQ ID NO: 406 - RNA, 98 nt, Artificial Sequence
  Synthetic
  misc_feature (1)..(28): n is a, c, g, or u
  misc_feature (9)..(28): n may or may not be present
nnnnnnnnnnnnnnnnnnnnnnnnnnnnguuuuagagcuagaaauagcaaguuaaaauaaggcuaguccguuaucaagaaauggcaccgagucggugc

SEQ ID NO: 407 - RNA, 98 nt, Artificial Sequence
  Synthetic
  misc_feature (1)..(28): n is a, c, g, or u
  misc_feature (9)..(28): n may or may not be present
nnnnnnnnnnnnnnnnnnnnnnnnnnnnguuuuagagcuagaaauagcaaguuaaaauaaggcuaguccguuaucacgaaagggcaccgagucggugc

SEQ ID NO: 408 - RNA, 97 nt, Artificial Sequence
  Synthetic
  misc_feature (1)..(28): n is a, c, g, or u
  misc_feature (9)..(28): n may or may not be present
nnnnnnnnnnnnnnnnnnnnnnnnnnnnguuuuagagcuagaaauagcaaguuaaaauaaggcuaguccguuaucaaaaauggcaccgagucggugc

SEQ ID NO: 409 - RNA, 97 nt, Artificial Sequence
  Synthetic
  misc_feature (1)..(28): n is a, c, g, or u
  misc_feature (9)..(28): n may or may not be present
nnnnnnnnnnnnnnnnnnnnnnnnnnnnguuuuagagcuagaaauagcaaguuaaaauaaggcuaguccguuaucaaaaguggcaccgagucggugc

SEQ ID NO: 410 - RNA, 97 nt, Artificial Sequence
  Synthetic
  misc_feature (1)..(28): n is a, c, g, or u
  misc_feature (9)..(28): n may or may not be present
nnnnnnnnnnnnnnnnnnnnnnnnnnnnguuuuagagcuagaaauagcaaguuaaaauaaggcuaguccguuaucaacaguggcaccgagucggugc

SEQ ID NO: 411 - RNA, 96 nt, Artificial Sequence
  Synthetic
  misc_feature (1)..(28): n is a, c, g, or u
  misc_feature (9)..(28): n may or may not be present
nnnnnnnnnnnnnnnnnnnnnnnnnnnnguuuuagagcuagaaauagcaaguuaaaauaaggcuaguccguuaucacaagggcaccgagucggugc

SEQ ID NO: 412 - RNA, 96 nt, Artificial Sequence
  Synthetic
  misc_feature (1)..(28): n is a, c, g, or u
  misc_feature (9)..(28): n may or may not be present
nnnnnnnnnnnnnnnnnnnnnnnnnnnnguuuuagagcuagaaauagcaaguuaaaauaaggcuaguccguuaucaaaauggcaccgagucggugc

SEQ ID NO: 413 - RNA, 94 nt, Artificial Sequence
  Synthetic
  misc_feature (1)..(28): n is a, c, g, or u
  misc_feature (9)..(28): n may or may not be present
nnnnnnnnnnnnnnnnnnnnnnnnnnnnguuuuagagcuagaaauagcaaguuaaaauaaggcuaguccguuaucaaaggcaccgagucggugc

SEQ ID NO: 414 - RNA, 94 nt, Artificial Sequence
  Synthetic
  misc_feature (1)..(28): n is a, c, g, or u
  misc_feature (9)..(28): n may or may not be present
nnnnnnnnnnnnnnnnnnnnnnnnnnnnguuuuagagcuagaaauagcaaguuaaaauaaggcuaguccguuaucaagggcaccgagucggugc

SEQ ID NO: 415 - RNA, 92 nt, Artificial Sequence
  Synthetic
  misc_feature (1)..(28): n is a, c, g, or u
  misc_feature (9)..(28): n may or may not be present
nnnnnnnnnnnnnnnnnnnnnnnnnnnnguuuuagagcuagaaauagcaaguuaaaauaaggcuaguccguuaucaggcaccgagucggugc

SEQ ID NO: 416 - RNA, 95 nt, Artificial Sequence
  Synthetic
  misc_feature (1)..(28): n is a, c, g, or u
  misc_feature (9)..(28): n may or may not be present
nnnnnnnnnnnnnnnnnnnnnnnnnnnnguuuuagagcuagaauagcaaguuaaaauaaggcuaguccguuaucaacuuggcaccgagucggugc

SEQ ID NO: 417 - RNA, 95 nt, Artificial Sequence
  Synthetic
  misc_feature (1)..(28): n is a, c, g, or u
  misc_feature (9)..(28): n may or may not be present
nnnnnnnnnnnnnnnnnnnnnnnnnnnnguuuuagagcgcaaagcgcaaguuaaaauaaggcuaguccguuaucaacuuggcaccgagucggugc

SEQ ID NO: 418 - RNA, 95 nt, Artificial Sequence
  Synthetic
  misc_feature (1)..(28): n is a, c, g, or u
  misc_feature (9)..(28): n may or may not be present
nnnnnnnnnnnnnnnnnnnnnnnnnnnnguuuuagagcgcgaagcgcaaguuaaaauaaggcuaguccguuaucaacuuggcaccgagucggugc

SEQ ID NO: 419 - RNA, 95 nt, Artificial Sequence
  Synthetic
  misc_feature (1)..(28): n is a, c, g, or u
  misc_feature (9)..(28): n may or may not be present
nnnnnnnnnnnnnnnnnnnnnnnnnnnnguuuuagagcggaaacgcaaguuaaaauaaggcuaguccguuaucaacuuggcaccgagucggugcu

SEQ ID NO: 420 - RNA, 94 nt, Artificial Sequence
  Synthetic
  misc_feature (1)..(28): n is a, c, g, or u
  misc_feature (9)..(28): n may or may not be present
nnnnnnnnnnnnnnnnnnnnnnnnnnnnguuuuagagcggaaacgcaaguuaaaauaaggcuaguccguuaucaacuuggcaccgagucggugc

SEQ ID NO: 421 - RNA, 94 nt, Artificial Sequence
  Synthetic
  misc_feature (1)..(28): n is a, c, g, or u
  misc_feature (9)..(28): n may or may not be present
nnnnnnnnnnnnnnnnnnnnnnnnnnnnguuuuagagccgaaaggcaaguuaaaauaaggcuaguccguuaucaacuuggcaccgagucggugc

SEQ ID NO: 422 - RNA, 94 nt, Artificial Sequence
  Synthetic
  misc_feature (1)..(28): n is a, c, g, or u
  misc_feature (9)..(28): n may or may not be present
nnnnnnnnnnnnnnnnnnnnnnnnnnnnguuuuagagcugaaaagcaaguuaaaauaaggcuaguccguuaucaacuuggcaccgagucggugc

SEQ ID NO: 423 - RNA, 92 nt, Artificial Sequence
  Synthetic
  misc_feature (1)..(28): n is a, c, g, or u
  misc_feature (9)..(28): n may or may not be present
nnnnnnnnnnnnnnnnnnnnnnnnnnnnguuuuagagcgaaagcaaguuaaaauaaggcuaguccguuaucaacuuggcaccgagucggugc

SEQ ID NO: 424 - RNA, 91 nt, Artificial Sequence
  Synthetic
  misc_feature (1)..(28): n is a, c, g, or u
  misc_feature (9)..(28): n may or may not be present
nnnnnnnnnnnnnnnnnnnnnnnnnnnnguuuuagagcgaagcaaguuaaaauaaggcuaguccguuaucaacuuggcaccgagucggugc

SEQ ID NO: 425 - RNA, 91 nt, Artificial Sequence
  Synthetic
  misc_feature (1)..(28): n is a, c, g, or u
  misc_feature (9)..(28): n may or may not be present
nnnnnnnnnnnnnnnnnnnnnnnnnnnnguuuuagagcaaagcaaguuaaaauaaggcuaguccguuaucaacuuggcaccgagucggugc

SEQ ID NO: 426 - RNA, 90 nt, Artificial Sequence
  Synthetic
  misc_feature (1)..(28): n is a, c, g, or u
  misc_feature (9)..(28): n may or may not be present
nnnnnnnnnnnnnnnnnnnnnnnnnnnnguuuuagaggaaacaaguuaaaauaaggcuaguccguuaucaacuuggcaccgagucggugc

SEQ ID NO: 427 - RNA, 90 nt, Artificial Sequence
  Synthetic
  misc_feature (1)..(28): n is a, c, g, or u
  misc_feature (9)..(28): n may or may not be present
nnnnnnnnnnnnnnnnnnnnnnnnnnnnguuuuagagcaagcaaguuaaaauaaggcuaguccguuaucaacuuggcaccgagucggugc

SEQ ID NO: 428 - RNA, 90 nt, Artificial Sequence
  Synthetic
  misc_feature (1)..(28): n is a, c, g, or u
  misc_feature (9)..(28): n may or may not be present
nnnnnnnnnnnnnnnnnnnnnnnnnnnnguuuuagagcgagcaaguuaaaauaaggcuaguccguuaucaacuuggcaccgagucggugc

SEQ ID NO: 429 - RNA, 88 nt, Artificial Sequence
  Synthetic
  misc_feature (1)..(28): n is a, c, g, or u
  misc_feature (9)..(28): n may or may not be present
nnnnnnnnnnnnnnnnnnnnnnnnnnnnguuuuagagcgcaaguuaaaauaaggcuaguccguuaucaacuuggcaccgagucggugc

SEQ ID NO: 430 - RNA, 88 nt, Artificial Sequence
  Synthetic
  misc_feature (1)..(28): n is a, c, g, or u
  misc_feature (9)..(28): n may or may not be present
nnnnnnnnnnnnnnnnnnnnnnnnnnnnguuuuagagaacaaguuaaaauaaggcuaguccguuaucaacuuggcaccgagucggugc

SEQ ID NO: 431 - RNA, 87 nt, Artificial Sequence
  Synthetic
  misc_feature (1)..(28): n is a, c, g, or u
  misc_feature (9)..(28): n may or may not be present
nnnnnnnnnnnnnnnnnnnnnnnnnnnnguuuuagagacaaguuaaaauaaggcuaguccguuaucaacuuggcaccgagucggugc

SEQ ID NO: 432 - RNA, 86 nt, Artificial Sequence
  Synthetic
  misc_feature (1)..(28): n is a, c, g, or u
  misc_feature (9)..(28): n may or may not be present
nnnnnnnnnnnnnnnnnnnnnnnnnnnnguuuuagagcaaguuaaaauaaggcuaguccguuaucaacuuggcaccgagucggugc

SEQ ID NO: 433 - RNA, 86 nt, Artificial Sequence
  Synthetic
  misc_feature (1)..(28): n is a, c, g, or u
  misc_feature (9)..(28): n may or may not be present
nnnnnnnnnnnnnnnnnnnnnnnnnnnnguuuuagaaaaaguuaaaauaaggcuaguccguuaucaacuuggcaccgagucggugc

SEQ ID NO: 434 - RNA, 85 nt, Artificial Sequence
  Synthetic
  misc_feature (1)..(28): n is a, c, g, or u
  misc_feature (9)..(28): n may or may not be present
nnnnnnnnnnnnnnnnnnnnnnnnnnnnguuuuagaaaaguuaaaauaaggcuaguccguuaucaacuuggcaccgagucggugc

SEQ ID NO: 435 - RNA, 95 nt, Artificial Sequence
  Synthetic
  misc_feature (1)..(28): n is a, c, g, or u
  misc_feature (9)..(28): n may or may not be present
nnnnnnnnnnnnnnnnnnnnnnnnnnnnguuuuagagcuagaaauagcaaguuaaaauaaggcuaguccguuaucaacuuggcaccgagucggug

SEQ ID NO: 436 - RNA, 94 nt, Artificial Sequence
  Synthetic
  misc_feature (1)..(28): n is a, c, g, or u
  misc_feature (9)..(28): n may or may not be present
nnnnnnnnnnnnnnnnnnnnnnnnnnnnguuuuagagcuagaaauagcaaguuaaaauaaggcuaguccguuaucaacuuggcaccgagucggu

SEQ ID NO: 437 - RNA, 93 nt, Artificial Sequence
  Synthetic
  misc_feature (1)..(28): n is a, c, g, or u
  misc_feature (9)..(28): n may or may not be present
nnnnnnnnnnnnnnnnnnnnnnnnnnnnguuuuagagcuagaaauagcaaguuaaaauaaggcuaguccguuaucaacuuggcaccgagucgg

SEQ ID NO: 438 - RNA, 92 nt, Artificial Sequence
  Synthetic
  misc_feature (1)..(28): n is a, c, g, or u
  misc_feature (9)..(28): n may or may not be present
nnnnnnnnnnnnnnnnnnnnnnnnnnnnguuuuagagcuagaaauagcaaguuaaaauaaggcuaguccguuaucaacuuggcaccgagucg

SEQ ID NO: 439 - RNA, 91 nt, Artificial Sequence
  Synthetic
  misc_feature (1)..(28): n is a, c, g, or u
  misc_feature (9)..(28): n may or may not be present
nnnnnnnnnnnnnnnnnnnnnnnnnnnnguuuuagagcuagaaauagcaaguuaaaauaaggcuaguccguuaucaacuuggcaccgaguc

SEQ ID NO: 440 - RNA, 90 nt, Artificial Sequence
  Synthetic
  misc_feature (1)..(28): n is a, c, g, or u
  misc_feature (9)..(28): n may or may not be present
nnnnnnnnnnnnnnnnnnnnnnnnnnnnguuuuagagcuagaaauagcaaguuaaaauaaggcuaguccguuaucaacuuggcaccgagu

SEQ ID NO: 441 - RNA, 90 nt, Artificial Sequence
  Synthetic
  misc_feature (1)..(28): n is a, c, g, or u
  misc_feature (9)..(28): n may or may not be present
nnnnnnnnnnnnnnnnnnnnnnnnnnnnguuuuagagcgaaagcaaguuaaaauaaggcuaguccguuaucacuggcaccgagucggugc

SEQ ID NO: 442 - RNA, 88 nt, Artificial Sequence
  Synthetic
  misc_feature (1)..(28): n is a, c, g, or u
  misc_feature (9)..(28): n may or may not be present
nnnnnnnnnnnnnnnnnnnnnnnnnnnnguuuuagagcgaaagcaaguuaaaauaaggcuaguccguuaucaggcaccgagucggugc

SEQ ID NO: 443 - RNA, 88 nt, Artificial Sequence
  Synthetic
  misc_feature (1)..(28): n is a, c, g, or u
  misc_feature (9)..(28): n may or may not be present
nnnnnnnnnnnnnnnnnnnnnnnnnnnnguuuuagagaaaaaguuaaaauaaggcuaguccguuaucaacuuggcaccgagucggugc

SEQ ID NO: 444 - RNA, 88 nt, Artificial Sequence
  Synthetic
  misc_feature (1)..(28): n is a, c, g, or u
  misc_feature (9)..(28): n may or may not be present
nnnnnnnnnnnnnnnnnnnnnnnnnnnnguuuuagaggaaacaaguuaaaauaaggcuaguccguuaucaauggcaccgagucggugc

SEQ ID NO: 445 - RNA, 86 nt, Artificial Sequence
  Synthetic
  misc_feature (1)..(28): n is a, c, g, or u
  misc_feature (9)..(28): n may or may not be present
nnnnnnnnnnnnnnnnnnnnnnnnnnnnguuuuagagaaaaaguuaaaauaaggcuaguccguuaucaauggcaccgagucggugc

SEQ ID NO: 446 - RNA, 88 nt, Artificial Sequence
  Synthetic
  misc_feature (1)..(28): n is a, c, g, or u
  misc_feature (9)..(28): n may or may not be present
nnnnnnnnnnnnnnnnnnnnnnnnnnnnguuuuagaggaaacaaguuaaaauaaggcuaguccguuaucacuggcaccgagucggugc

SEQ ID NO: 447 - RNA, 84 nt, Artificial Sequence
  Synthetic
  misc_feature (1)..(28): n is a, c, g, or u
  misc_feature (9)..(28): n may or may not be present
nnnnnnnnnnnnnnnnnnnnnnnnnnnnguuuuagagaaaaaguuaaaauaaggcuaguccguuaucaggcaccgagucggugc

SEQ ID NO: 448 - RNA, 94 nt, Artificial Sequence
  Synthetic
  misc_feature (1)..(28): n is a, c, g, or u
  misc_feature (9)..(28): n may or may not be present
nnnnnnnnnnnnnnnnnnnnnnnnnnnnguuuuagagcgaaagcaaguuaaaauaaggcuaguccguuaucaagcuauggcaccgagucggugc

SEQ ID NO: 449 - RNA, 95 nt, Artificial Sequence
  Synthetic
  misc_feature (1)..(28): n is a, c, g, or u
  misc_feature (9)..(28): n may or may not be present
nnnnnnnnnnnnnnnnnnnnnnnnnnnnguuuuagagcuagaaauagcaaguuaaaauaaggcaguccguuaucaacuuggcaccgagucggugc

SEQ ID NO: 450 - RNA, 95 nt, Artificial Sequence
  Synthetic
  misc_feature (1)..(28): n is a, c, g, or u
  misc_feature (9)..(28): n may or may not be present
nnnnnnnnnnnnnnnnnnnnnnnnnnnnguuuuagagcuagaaauagcaaguuaaaauaaggcuguccguuaucaacuuggcaccgagucggugc

SEQ ID NO: 451 - RNA, 94 nt, Artificial Sequence
  Synthetic
  misc_feature (1)..(28): n is a, c, g, or u
  misc_feature (9)..(28): n may or may not be present
nnnnnnnnnnnnnnnnnnnnnnnnnnnnguuuuagagcuagaaauagcaaguuaaaauaaggcguccguuaucaacuuggcaccgagucggugc

SEQ ID NO: 452 - RNA, 94 nt, Artificial Sequence
  Synthetic
  misc_feature (1)..(28): n is a, c, g, or u
  misc_feature (9)..(28): n may or may not be present
nnnnnnnnnnnnnnnnnnnnnnnnnnnnguuuuagagcuagaaauagcaaguuaaaauaagguauccguuaucaacuuggcaccgagucggugc

SEQ ID NO: 453 - RNA, 93 nt, Artificial Sequence
  Synthetic
  misc_feature (1)..(28): n is a, c, g, or u
  misc_feature (9)..(28): n may or may not be present
nnnnnnnnnnnnnnnnnnnnnnnnnnnnguuuuagagcuagaaauagcaaguuaaaauaagguuccguuaucaacuuggcaccgagucggugc

SEQ ID NO: 454 - RNA, 93 nt, Artificial Sequence
  Synthetic
  misc_feature (1)..(28): n is a, c, g, or u
  misc_feature (9)..(28): n may or may not be present
nnnnnnnnnnnnnnnnnnnnnnnnnnnnguuuuagagcuagaaauagcaaguuaaaauaaggauccguuaucaacuuggcaccgagucggugc

SEQ ID NO: 455 - RNA, 96 nt, Artificial Sequence
  Synthetic
  misc_feature (1)..(28): n is a, c, g, or u
  misc_feature (9)..(28): n may or may not be present
nnnnnnnnnnnnnnnnnnnnnnnnnnnnguuuucgagcuagaaauagcaagugaaaauaaggcuaguccguuaucaacuuggcaccgagucggugc

SEQ ID NO: 456 - RNA, 96 nt, Artificial Sequence
  Synthetic
  misc_feature (1)..(28): n is a, c, g, or u
  misc_feature (9)..(28): n may or may not be present
nnnnnnnnnnnnnnnnnnnnnnnnnnnnguuuuugagcuagaaauagcaaguaaaaauaaggcuaguccguuaucaacuuggcaccgagucggugc

SEQ ID NO: 457 - RNA, 96 nt, Artificial Sequence
  Synthetic
  misc_feature (1)..(28): n is a, c, g, or u
  misc_feature (9)..(28): n may or may not be present
nnnnnnnnnnnnnnnnnnnnnnnnnnnnguuuuagagcgagaaaucgcaaguuaaaauaaggcuaguccguuaucaacuuggcaccgagucggugc

SEQ ID NO: 458 - RNA, 96 nt, Artificial Sequence
  Synthetic
  misc_feature (1)..(28): n is a, c, g, or u
  misc_feature (9)..(28): n may or may not be present
nnnnnnnnnnnnnnnnnnnnnnnnnnnnguuuuagagcuagaaauagcgaguuaaaauaaggcuaguccguuaucaacuuggcaccgagucggugc

SEQ ID NO: 459 - RNA, 96 nt, Artificial Sequence
  Synthetic
  misc_feature (1)..(28): n is a, c, g, or u
  misc_feature (9)..(28): n may or may not be present
nnnnnnnnnnnnnnnnnnnnnnnnnnnnguuuuagagcuagaaauagccgguuaaaauaaggcuaguccguuaucaacuuggcaccgagucggugc

SEQ ID NO: 460 - RNA, 96 nt, Artificial Sequence
  Synthetic
  misc_feature (1)..(28): n is a, c, g, or u
  misc_feature (9)..(28): n may or may not be present
nnnnnnnnnnnnnnnnnnnnnnnnnnnnguuuuagagcuagaaauagcaaguuaaaaugaggcuaguccguuaucaacuuggcaccgagucggugc

SEQ ID NO: 461 - RNA, 96 nt, Artificial Sequence
  Synthetic
  misc_feature (1)..(28): n is a, c, g, or u
  misc_feature (9)..(28): n may or may not be present
nnnnnnnnnnnnnnnnnnnnnnnnnnnnguuuuagagcuagaaauagcaaguuaaaauaaggcugguccguuaucaacuuggcaccgagucggugc

SEQ ID NO: 462 - RNA, 96 nt, Artificial Sequence
  Synthetic
  misc_feature (1)..(28): n is a, c, g, or u
  misc_feature (9)..(28): n may or may not be present
nnnnnnnnnnnnnnnnnnnnnnnnnnnnguuuuagagcuagaaauagcaaguuaaaauaaggcucguccguuaucaacuuggcaccgagucggugc

SEQ ID NO: 463 - RNA, 96 nt, Artificial Sequence
  Synthetic
  misc_feature (1)..(28): n is a, c, g, or u
  misc_feature (9)..(28): n may or may not be present
nnnnnnnnnnnnnnnnnnnnnnnnnnnnguuuuagagcuagaaauagcaaguuaaaauaaggcuuguccguuaucaacuuggcaccgagucggugc

SEQ ID NO: 464 - RNA, 96 nt, Artificial Sequence
  Synthetic
  misc_feature (1)..(28): n is a, c, g, or u
  misc_feature (9)..(28): n may or may not be present
nnnnnnnnnnnnnnnnnnnnnnnnnnnnguuuuagagcuagaaauagcaaguuaaaauaaggcuaguccguugucaacuuggcaccgagucggugc

SEQ ID NO: 465 - RNA, 96 nt, Artificial Sequence
  Synthetic
  misc_feature (1)..(28): n is a, c, g, or u
  misc_feature (9)..(28): n may or may not be present
nnnnnnnnnnnnnnnnnnnnnnnnnnnnguuuuagagcuagaaauagcaaguuaaaauaaggcuaguccguucucaacuuggcaccgagucggugc

SEQ ID NO: 466 - RNA, 96 nt, Artificial Sequence
  Synthetic
  misc_feature (1)..(28): n is a, c, g, or u
  misc_feature (9)..(28): n may or may not be present
nnnnnnnnnnnnnnnnnnnnnnnnnnnnguuuuagagcuagaaauagcaaguuaaaauaaggcuaguccguuuucaacuuggcaccgagucggugc

SEQ ID NO: 467 - RNA, 96 nt, Artificial Sequence
  Synthetic
  misc_feature (1)..(28): n is a, c, g, or u
  misc_feature (9)..(28): n may or may not be present
nnnnnnnnnnnnnnnnnnnnnnnnnnnnguuuuagagcuagaaauagcaaguuaaaauaaggcuaguccguuaugaacuuggcaccgagucggugc

SEQ ID NO: 468 - RNA, 96 nt, Artificial Sequence
  Synthetic
  misc_feature (1)..(28): n is a, c, g, or u
  misc_feature (9)..(28): n may or may not be present
nnnnnnnnnnnnnnnnnnnnnnnnnnnnguuuuagagcuagaaauagcaaguuaaaauaaggcuaguccguuaucaacuugggaccgagucggucc

SEQ ID NO: 469 - RNA, 96 nt, Artificial Sequence
  Synthetic
  misc_feature (1)..(28): n is a, c, g, or u
  misc_feature (9)..(28): n may or may not be present
nnnnnnnnnnnnnnnnnnnnnnnnnnnnguuuuagagcuagaaauagcaaguuaaaauaaggcuaguccguuaucaacuuggaaccgagucgguuc

SEQ ID NO: 470 - RNA, 96 nt, Artificial Sequence
  Synthetic
  misc_feature (1)..(28): n is a, c, g, or u
  misc_feature (9)..(28): n may or may not be present
nnnnnnnnnnnnnnnnnnnnnnnnnnnnguuuucgagcgagaaaucgcgagugaaaaugaggcugguccguugugaacuuggaaccgagucgguuc

SEQ ID NO: 471 - RNA, 96 nt, Artificial Sequence
  Synthetic
  misc_feature (1)..(28): n is a, c, g, or u
  misc_feature (9)..(28): n may or may not be present
nnnnnnnnnnnnnnnnnnnnnnnnnnnnguuuuugagcgagaaaucgcaaguaaaaauaaggcucguccguucugaacuuggaaccgagucgguuc

SEQ ID NO: 472 - RNA, 96 nt, Artificial Sequence
  Synthetic
  misc_feature (1)..(28): n is a, c, g, or u
  misc_feature (9)..(28): n may or may not be present
nnnnnnnnnnnnnnnnnnnnnnnnnnnnguuucggagccggaaacggcgagucgaaaugaggcugguccguugucggcucggaaccgagucgguuc

SEQ ID NO: 473 - RNA, 96 nt, Artificial Sequence
  Synthetic
  misc_feature (1)..(28): n is a, c, g, or u
  misc_feature (9)..(28): n may or may not be present
nnnnnnnnnnnnnnnnnnnnnnnnnnnnguuuuagagcuagaaauagcaaguuaaaauaaggcuaguccguuaucaacuuggcaccgagucggugc

SEQ ID NO: 474 - RNA, 96 nt, Artificial Sequence; identical to SEQ ID NO: 473
  Synthetic
  misc_feature (1)..(28): n is a, c, g, or u
  misc_feature (9)..(28): n may or may not be present

SEQ ID NO: 475 - RNA, 96 nt, Artificial Sequence; identical to SEQ ID NO: 473
  Synthetic
  misc_feature (1)..(28): n is a, c, g, or u
  misc_feature (9)..(28): n may or may not be present

SEQ ID NO: 476 - RNA, 96 nt, Artificial Sequence; identical to SEQ ID NO: 473
  Synthetic
  misc_feature (1)..(28): n is a, c, g, or u
  misc_feature (9)..(28): n may or may not be present

SEQ ID NO: 477 - RNA, 96 nt, Artificial Sequence; identical to SEQ ID NO: 473
  Synthetic
  misc_feature (1)..(28): n is a, c, g, or u
  misc_feature (9)..(28): n may or may not be present

SEQ ID NO: 478 - RNA, 96 nt, Artificial Sequence; identical to SEQ ID NO: 473
  Synthetic
  misc_feature (1)..(28): n is a, c, g, or u
  misc_feature (9)..(28): n may or may not be present

SEQ ID NO: 479 - RNA, 96 nt, Artificial Sequence; identical to SEQ ID NO: 473
  Synthetic
  misc_feature (1)..(28): n is a, c, g, or u
  misc_feature (9)..(28): n may or may not be present

SEQ ID NO: 480 - RNA, 96 nt, Artificial Sequence; identical to SEQ ID NO: 473
  Synthetic
  misc_feature (1)..(28): n is a, c, g, or u
  misc_feature (9)..(28): n may or may not be present

SEQ ID NO: 481 - RNA, 98 nt, Artificial Sequence; identical to SEQ ID NO: 407
  Synthetic
  misc_feature (1)..(28): n is a, c, g, or u
  misc_feature (9)..(28): n may or may not be present

SEQ ID NO: 482 - RNA, 97 nt, Artificial Sequence; identical to SEQ ID NO: 408
  Synthetic
  misc_feature (1)..(28): n is a, c, g, or u
  misc_feature (9)..(28): n may or may not be present

SEQ ID NO: 483 - RNA, 96 nt, Artificial Sequence; identical to SEQ ID NO: 411
  Synthetic
  misc_feature (1)..(28): n is a, c, g, or u
  misc_feature (9)..(28): n may or may not be present

SEQ ID NO: 484 - RNA, 96 nt, Artificial Sequence; identical to SEQ ID NO: 412
  Synthetic
  misc_feature (1)..(28): n is a, c, g, or u
  misc_feature (9)..(28): n may or may not be present

SEQ ID NO: 485 - RNA, 95 nt, Artificial Sequence
  Synthetic
  misc_feature (1)..(28): n is a, c, g, or u
  misc_feature (9)..(28): n may or may not be present
nnnnnnnnnnnnnnnnnnnnnnnnnnnnguuuuagagcgcgaagcgcaaguuaaaauaaggcuaguccguuaucaaaauggcaccgagucggugc

SEQ ID NO: 486 - RNA, 94 nt, Artificial Sequence
  Synthetic
  misc_feature (1)..(28): n is a, c, g, or u
  misc_feature (9)..(28): n may or may not be present
nnnnnnnnnnnnnnnnnnnnnnnnnnnnguuuuagagcugaaaagcaaguuaaaauaaggcuaguccguuaucaaaauggcaccgagucggugc

SEQ ID NO: 487 - RNA, 92 nt, Artificial Sequence
  Synthetic
  misc_feature (1)..(28): n is a, c, g, or u
  misc_feature (9)..(28): n may or may not be present
nnnnnnnnnnnnnnnnnnnnnnnnnnnnguuuuagagcgaaagcaaguuaaaauaaggcuaguccguuaucaaaauggcaccgagucggugc

SEQ ID NO: 488 - RNA, 91 nt, Artificial Sequence
  Synthetic
  misc_feature (1)..(28): n is a, c, g, or u
  misc_feature (9)..(28): n may or may not be present
nnnnnnnnnnnnnnnnnnnnnnnnnnnnguuuuagagcaaagcaaguuaaaauaaggcuaguccguuaucaaaauggcaccgagucggugc

SEQ ID NO: 489 - RNA, 92 nt, Artificial Sequence; identical to SEQ ID NO: 423
  Synthetic
  misc_feature (1)..(28): n is a, c, g, or u
  misc_feature (9)..(28): n may or may not be present

SEQ ID NO: 490 - RNA, 94 nt, Artificial Sequence
  Synthetic
  misc_feature (1)..(28): n is a, c, g, or u
  misc_feature (9)..(28): n may or may not be present
nnnnnnnnnnnnnnnnnnnnnnnnnnnnguuuuagagcgaaagcaaguuaaaauaaggcuaguccguuaucaagaaauggcaccgagucggugc

SEQ ID NO: 491 - RNA, 98 nt, Artificial Sequence; identical to SEQ ID NO: 407
  Synthetic
  misc_feature (1)..(28): n is a, c, g, or u
  misc_feature (9)..(28): n may or may not be present

SEQ ID NO: 492 - RNA, 96 nt, Artificial Sequence; identical to SEQ ID NO: 412
  Synthetic
  misc_feature (1)..(28): n is a, c, g, or u
  misc_feature (9)..(28): n may or may not be present

SEQ ID NO: 493 - RNA, 98 nt, Artificial Sequence; identical to SEQ ID NO: 407
  Synthetic
  misc_feature (1)..(28): n is a, c, g, or u
  misc_feature (9)..(28): n may or may not be present

SEQ ID NO: 494 - RNA, 96 nt, Artificial Sequence; identical to SEQ ID NO: 412
  Synthetic
  misc_feature (1)..(28): n is a, c, g, or u
  misc_feature (9)..(28): n may or may not be present

SEQ ID NO: 495-500 - skipped (6 entries)

SEQ ID NO: 501 - RNA, 96 nt, Artificial Sequence; identical to SEQ ID NO: 401
  Synthetic
  misc_feature: 3 consecutive nucleotides at 5' and 3' end modified with 2'-OMe and a 3' PS linkage
  misc_feature (1)..(28): n is a, c, g, or u
  misc_feature (9)..(28): n may or may not be present

SEQ ID NO: 502 - RNA, 96 nt, Artificial Sequence; identical to SEQ ID NO: 402
  Synthetic
  misc_feature: 3 consecutive nucleotides at 5' and 3' end modified with 2'-OMe and a 3' PS linkage
  misc_feature (1)..(28): n is a, c, g, or u
  misc_feature (9)..(28): n may or may not be present

SEQ ID NO: 503 - RNA, 96 nt, Artificial Sequence; identical to SEQ ID NO: 403
  Synthetic
  misc_feature: 3 consecutive nucleotides at 5' and 3' end modified with 2'-OMe and a 3' PS linkage
  misc_feature (1)..(28): n is a, c, g, or u
  misc_feature (9)..(28): n may or may not be present

SEQ ID NO: 504 - RNA, 96 nt, Artificial Sequence; identical to SEQ ID NO: 404
  Synthetic
  misc_feature: 3 consecutive nucleotides at 5' and 3' end modified with 2'-OMe and a 3' PS linkage
  misc_feature (1)..(28): n is a, c, g, or u
  misc_feature (9)..(28): n may or may not be present

SEQ ID NO: 505 - RNA, 98 nt, Artificial Sequence; identical to SEQ ID NO: 405
  Synthetic
  misc_feature: 3 consecutive nucleotides at 5' and 3' end modified with 2'-OMe and a 3' PS linkage
  misc_feature (1)..(28): n is a, c, g, or u
  misc_feature (9)..(28): n may or may not be present

SEQ ID NO: 506 - RNA, 98 nt, Artificial Sequence; identical to SEQ ID NO: 406
  Synthetic
  misc_feature: 3 consecutive nucleotides at 5' and 3' end modified with 2'-OMe and a 3' PS linkage
  misc_feature (1)..(28): n is a, c, g, or u
  misc_feature (9)..(28): n may or may not be present

SEQ ID NO: 507 - RNA, 98 nt, Artificial Sequence; identical to SEQ ID NO: 407
  Synthetic
  misc_feature: 3 consecutive nucleotides at 5' and 3' end modified with 2'-OMe and a 3' PS linkage
  misc_feature (1)..(28): n is a, c, g, or u
  misc_feature (9)..(28): n may or may not be present

SEQ ID NO: 508 - RNA, 97 nt, Artificial Sequence; identical to SEQ ID NO: 408
  Synthetic
  misc_feature: 3 consecutive nucleotides at 5' and 3' end modified with 2'-OMe and a 3' PS linkage
  misc_feature (1)..(28): n is a, c, g, or u
  misc_feature (9)..(28): n may or may not be present

SEQ ID NO: 509 - RNA, 97 nt, Artificial Sequence; identical to SEQ ID NO: 409
  Synthetic
  misc_feature: 3 consecutive nucleotides at 5' and 3' end modified with 2'-OMe and a 3' PS linkage
  misc_feature (1)..(28): n is a, c, g, or u
  misc_feature (9)..(28): n may or may not be present

SEQ ID NO: 510 - RNA, 97 nt, Artificial Sequence; identical to SEQ ID NO: 410
  Synthetic
  misc_feature: 3 consecutive nucleotides at 5' and 3' end modified with 2'-OMe and a 3' PS linkage
  misc_feature (1)..(28): n is a, c, g, or u
  misc_feature (9)..(28): n may or may not be present

SEQ ID NO: 511 - RNA, 96 nt, Artificial Sequence; identical to SEQ ID NO: 411
  Synthetic
  misc_feature: 3 consecutive nucleotides at 5' and 3' end modified with 2'-OMe and a 3' PS linkage
  misc_feature (1)..(28): n is a, c, g, or u
  misc_feature (9)..(28): n may or may not be present

SEQ ID NO: 512 - RNA, 96 nt, Artificial Sequence; identical to SEQ ID NO: 412
  Synthetic
  misc_feature: 3 consecutive nucleotides at 5' and 3' end modified with 2'-OMe and a 3' PS linkage
  misc_feature (1)..(28): n is a, c, g, or u
  misc_feature (9)..(28): n may or may not be present

SEQ ID NO: 513 - RNA, 94 nt, Artificial Sequence; identical to SEQ ID NO: 413
  Synthetic
  misc_feature: 3 consecutive nucleotides at 5' and 3' end modified with 2'-OMe and a 3' PS linkage
  misc_feature (1)..(28): n is a, c, g, or u
  misc_feature (9)..(28): n may or may not be present

SEQ ID NO: 514 - RNA, 94 nt, Artificial Sequence; identical to SEQ ID NO: 414
  Synthetic
  misc_feature: 3 consecutive nucleotides at 5' and 3' end modified with 2'-OMe and a 3' PS linkage
  misc_feature (1)..(28): n is a, c, g, or u
  misc_feature (9)..(28): n may or may not be present

SEQ ID NO: 515 - RNA, 92 nt, Artificial Sequence; identical to SEQ ID NO: 415
  Synthetic
  misc_feature: 3 consecutive nucleotides at 5' and 3' end modified with 2'-OMe and a 3' PS linkage
  misc_feature (1)..(28): n is a, c, g, or u
  misc_feature (9)..(28): n may or may not be present

SEQ ID NO: 516 - RNA, 95 nt, Artificial Sequence; identical to SEQ ID NO: 416
  Synthetic
  misc_feature: 3 consecutive nucleotides at 5' and 3' end modified with 2'-OMe and a 3' PS linkage
  misc_feature (1)..(28): n is a, c, g, or u
  misc_feature (9)..(28): n may or may not be present

SEQ ID NO: 517 - RNA, 95 nt, Artificial Sequence; identical to SEQ ID NO: 417
  Synthetic
  misc_feature: 3 consecutive nucleotides at 5' and 3' end modified with 2'-OMe and a 3' PS linkage
  misc_feature (1)..(28): n is a, c, g, or u
  misc_feature (9)..(28): n may or may not be present

SEQ ID NO: 518 - RNA, 95 nt, Artificial Sequence; identical to SEQ ID NO: 418
  Synthetic
  misc_feature: 3 consecutive nucleotides at 5' and 3' end modified with 2'-OMe and a 3' PS linkage
  misc_feature (1)..(28): n is a, c, g, or u
  misc_feature (9)..(28): n may or may not be present

SEQ ID NO: 519 - RNA, 95 nt, Artificial Sequence; identical to SEQ ID NO: 419
  Synthetic
  misc_feature: 3 consecutive nucleotides at 5' and 3' end modified with 2'-OMe and a 3' PS linkage
  misc_feature (1)..(28): n is a, c, g, or u
  misc_feature (9)..(28): n may or may not be present

SEQ ID NO: 520 - RNA, 94 nt, Artificial Sequence; identical to SEQ ID NO: 420
  Synthetic
  misc_feature: 3 consecutive nucleotides at 5' and 3' end modified with 2'-OMe and a 3' PS linkage
  misc_feature (1)..(28): n is a, c, g, or u
  misc_feature (9)..(28): n may or may not be present

SEQ ID NO: 521 - RNA, 94 nt, Artificial Sequence; identical to SEQ ID NO: 421
  Synthetic
  misc_feature: 3 consecutive nucleotides at 5' and 3' end modified with 2'-OMe and a 3' PS linkage
  misc_feature (1)..(28): n is a, c, g, or u
  misc_feature (9)..(28): n may or may not be present

SEQ ID NO: 522 - RNA, 94 nt, Artificial Sequence; identical to SEQ ID NO: 422
  Synthetic
  misc_feature: 3 consecutive nucleotides at 5' and 3' end modified with 2'-OMe and a 3' PS linkage
  misc_feature (1)..(28): n is a, c, g, or u
  misc_feature (9)..(28): n may or may not be present

SEQ ID NO: 523 - RNA, 92 nt, Artificial Sequence; identical to SEQ ID NO: 423
  Synthetic
  misc_feature: 3 consecutive nucleotides at 5' and 3' end modified with 2'-OMe and a 3' PS linkage
  misc_feature (1)..(28): n is a, c, g, or u
  misc_feature (9)..(28): n may or may not be present

SEQ ID NO: 524 - RNA, 91 nt, Artificial Sequence; identical to SEQ ID NO: 424
  Synthetic
  misc_feature: 3 consecutive nucleotides at 5' and 3' end modified with 2'-OMe and a 3' PS linkage
  misc_feature (1)..(28): n is a, c, g, or u
  misc_feature (9)..(28): n may or may not be present

SEQ ID NO: 525 - RNA, 91 nt, Artificial Sequence; identical to SEQ ID NO: 425
  Synthetic
  misc_feature: 3 consecutive nucleotides at 5' and 3' end modified with 2'-OMe and a 3' PS linkage
  misc_feature (1)..(28): n is a, c, g, or u
  misc_feature (9)..(28): n may or may not be present

SEQ ID NO: 526 - RNA, 90 nt, Artificial Sequence; identical to SEQ ID NO: 426
  Synthetic
  misc_feature: 3 consecutive nucleotides at 5' and 3' end modified with 2'-OMe and a 3' PS linkage
  misc_feature (1)..(28): n is a, c, g, or u
  misc_feature (9)..(28): n may or may not be present

SEQ ID NO: 527 - RNA, 90 nt, Artificial Sequence; identical to SEQ ID NO: 427
  Synthetic
  misc_feature: 3 consecutive nucleotides at 5' and 3' end modified with 2'-OMe and a 3' PS linkage
  misc_feature (1)..(28): n is a, c, g, or u
  misc_feature (9)..(28): n may or may not be present

SEQ ID NO: 528 - RNA, 90 nt, Artificial Sequence; identical to SEQ ID NO: 428
  Synthetic
  misc_feature: 3 consecutive nucleotides at 5' and 3' end modified with 2'-OMe and a 3' PS linkage
  misc_feature (1)..(28): n is a, c, g, or u
  misc_feature (9)..(28): n may or may not be present

SEQ ID NO: 529 - RNA, 88 nt, Artificial Sequence; identical to SEQ ID NO: 429
  Synthetic
  misc_feature: 3 consecutive nucleotides at 5' and 3' end modified with 2'-OMe and a 3' PS linkage
  misc_feature (1)..(28): n is a, c, g, or u
  misc_feature (9)..(28): n may or may not be present

SEQ ID NO: 530 - RNA, 88 nt, Artificial Sequence; identical to SEQ ID NO: 430
  Synthetic
  misc_feature: 3 consecutive nucleotides at 5' and 3' end modified with 2'-OMe and a 3' PS linkage
  misc_feature (1)..(28): n is a, c, g, or u
  misc_feature (9)..(28): n may or may not be present

SEQ ID NO: 531 - RNA, 87 nt, Artificial Sequence; identical to SEQ ID NO: 431
  Synthetic
  misc_feature: 3 consecutive nucleotides at 5' and 3' end modified with 2'-OMe and a 3' PS linkage
  misc_feature (1)..(28): n is a, c, g, or u
  misc_feature (9)..(28): n may or may not be present

SEQ ID NO: 532 - RNA, 86 nt, Artificial Sequence; identical to SEQ ID NO: 432
  Synthetic
  misc_feature: 3 consecutive nucleotides at 5' and 3' end modified with 2'-OMe and a 3' PS linkage
  misc_feature (1)..(28): n is a, c, g, or u
  misc_feature (9)..(28): n may or may not be present

SEQ ID NO: 533 - RNA, 86 nt, Artificial Sequence; identical to SEQ ID NO: 433
  Synthetic
  misc_feature: 3 consecutive nucleotides at 5' and 3' end modified with 2'-OMe and a 3' PS linkage
  misc_feature (1)..(28): n is a, c, g, or u
  misc_feature (9)..(28): n may or may not be present

SEQ ID NO: 534 - RNA, 85 nt, Artificial Sequence; identical to SEQ ID NO: 434
  Synthetic
  misc_feature: 3 consecutive nucleotides at 5' and 3' end modified with 2'-OMe and a 3' PS linkage
  misc_feature (1)..(28): n is a, c, g, or u
  misc_feature (9)..(28): n may or may not be present

SEQ ID NO: 535 - RNA, 95 nt, Artificial Sequence; identical to SEQ ID NO: 435
  Synthetic
  misc_feature: 3 consecutive nucleotides at 5' and 3' end modified with 2'-OMe and a 3' PS linkage
  misc_feature (1)..(28): n is a, c, g, or u
  misc_feature (9)..(28): n may or may not be present

SEQ ID NO: 536 - RNA, 94 nt, Artificial Sequence; identical to SEQ ID NO: 436
  Synthetic
  misc_feature: 3 consecutive nucleotides at 5' and 3' end modified with 2'-OMe and a 3' PS linkage
  misc_feature (1)..(28): n is a, c, g, or u
  misc_feature (9)..(28): n may or may not be present

SEQ ID NO: 537 - RNA, 93 nt, Artificial Sequence; identical to SEQ ID NO: 437
  Synthetic
  misc_feature: 3 consecutive nucleotides at 5' and 3' end modified with 2'-OMe and a 3' PS linkage
  misc_feature (1)..(28): n is a, c, g, or u
  misc_feature (9)..(28): n may or may not be present

SEQ ID NO: 538 - RNA, 92 nt, Artificial Sequence; identical to SEQ ID NO: 438
  Synthetic
  misc_feature: 3 consecutive nucleotides at 5' and 3' end modified with 2'-OMe and a 3' PS linkage
  misc_feature (1)..(28): n is a, c, g, or u
  misc_feature (9)..(28): n may or may not be present

SEQ ID NO: 539 - RNA, 91 nt, Artificial Sequence; identical to SEQ ID NO: 439
  Synthetic
  misc_feature: 3 consecutive nucleotides at 5' and 3' end modified with 2'-OMe and a 3' PS linkage
  misc_feature (1)..(28): n is a, c, g, or u
  misc_feature (9)..(28): n may or may not be present

SEQ ID NO: 540 - RNA, 90 nt, Artificial Sequence; identical to SEQ ID NO: 440
  Synthetic
  misc_feature: 3 consecutive nucleotides at 5' and 3' end modified with 2'-OMe and a 3' PS linkage
  misc_feature (1)..(28): n is a, c, g, or u
  misc_feature (9)..(28): n may or may not be present

SEQ ID NO: 541 - RNA, 90 nt, Artificial Sequence; identical to SEQ ID NO: 441
  Synthetic
  misc_feature: 3 consecutive nucleotides at 5' and 3' end modified with 2'-OMe and a 3' PS linkage
  misc_feature (1)..(28): n is a, c, g, or u
  misc_feature (9)..(28): n may or may not be present

SEQ ID NO: 542 - RNA, 88 nt, Artificial Sequence; identical to SEQ ID NO: 442
  Synthetic
  misc_feature: 3 consecutive nucleotides at 5' and 3' end modified with 2'-OMe and a 3' PS linkage
  misc_feature (1)..(28): n is a, c, g, or u
  misc_feature (9)..(28): n may or may not be present

SEQ ID NO: 543 - RNA, 88 nt, Artificial Sequence; identical to SEQ ID NO: 443
  Synthetic
  misc_feature: 3 consecutive nucleotides at 5' and 3' end modified with 2'-OMe and a 3' PS linkage
  misc_feature (1)..(28): n is a, c, g, or u
  misc_feature (9)..(28): n may or may not be present

SEQ ID NO: 544 - RNA, 88 nt, Artificial Sequence; identical to SEQ ID NO: 444
  Synthetic
  misc_feature: 3 consecutive nucleotides at 5' and 3' end modified with 2'-OMe and a 3' PS linkage
  misc_feature (1)..(28): n is a, c, g, or u
  misc_feature (9)..(28): n may or may not be present

SEQ ID NO: 545 - RNA, 86 nt, Artificial Sequence; identical to SEQ ID NO: 445
  Synthetic
  misc_feature: 3 consecutive nucleotides at 5' and 3' end modified with 2'-OMe and a 3' PS linkage
  misc_feature (1)..(28): n is a, c, g, or u
  misc_feature (9)..(28): n may or may not be present

SEQ ID NO: 546 - RNA, 88 nt, Artificial Sequence; identical to SEQ ID NO: 446
  Synthetic
  misc_feature: 3 consecutive nucleotides at 5' and 3' end modified with 2'-OMe and a 3' PS linkage
  misc_feature (1)..(28): n is a, c, g, or u
  misc_feature (9)..(28): n may or may not be present

SEQ ID NO: 547 - RNA, 84 nt, Artificial Sequence; identical to SEQ ID NO: 447
  Synthetic
  misc_feature: 3 consecutive nucleotides at 5' and 3' end modified with 2'-OMe and a 3' PS linkage
  misc_feature (1)..(28): n is a, c, g, or u
  misc_feature (9)..(28): n may or may not be present

SEQ ID NO: 548 - RNA, 94 nt, Artificial Sequence; identical to SEQ ID NO: 448
  Synthetic
  misc_feature: 3 consecutive nucleotides at 5' and 3' end modified with 2'-OMe and a 3' PS linkage
  misc_feature (1)..(28): n is a, c, g, or u
  misc_feature (9)..(28): n may or may not be present

SEQ ID NO: 549 - RNA, 95 nt, Artificial Sequence; identical to SEQ ID NO: 449
  Synthetic
  misc_feature: 3 consecutive nucleotides at 5' and 3' end modified with 2'-OMe and a 3' PS linkage
  misc_feature (1)..(28): n is a, c, g, or u
  misc_feature (9)..(28): n may or may not be present

SEQ ID NO: 550 - RNA, 95 nt, Artificial Sequence; identical to SEQ ID NO: 450
  Synthetic
  misc_feature: 3 consecutive nucleotides at 5' and 3' end modified with 2'-OMe and a 3' PS linkage
  misc_feature (1)..(28): n is a, c, g, or u
  misc_feature (9)..(28): n may or may not be present

SEQ ID NO: 551 - RNA, 94 nt, Artificial Sequence; identical to SEQ ID NO: 451
  Synthetic
  misc_feature: 3 consecutive nucleotides at 5' and 3' end modified with 2'-OMe and a 3' PS linkage
  misc_feature (1)..(28): n is a, c, g, or u
  misc_feature (9)..(28): n may or may not be present

SEQ ID NO: 552 - RNA, 94 nt, Artificial Sequence; identical to SEQ ID NO: 452
  Synthetic
  misc_feature: 3 consecutive nucleotides at 5' and 3' end modified with 2'-OMe and a 3' PS linkage
  misc_feature (1)..(28): n is a, c, g, or u
  misc_feature (9)..(28): n may or may not be present

SEQ ID NO: 553 - RNA, 93 nt, Artificial Sequence; identical to SEQ ID NO: 453
  Synthetic
  misc_feature: 3 consecutive nucleotides at 5' and 3' end modified with 2'-OMe and a 3' PS linkage
  misc_feature (1)..(28): n is a, c, g, or u
  misc_feature (9)..(28): n may or may not be present

SEQ ID NO: 554 - RNA, 93 nt, Artificial Sequence; identical to SEQ ID NO: 454
  Synthetic
  misc_feature: 3 consecutive nucleotides at 5' and 3' end modified with 2'-OMe and a 3' PS linkage
  misc_feature (1)..(28): n is a, c, g, or u
  misc_feature (9)..(28): n may or may not be present

SEQ ID NO: 555 - RNA, 96 nt, Artificial Sequence; identical to SEQ ID NO: 455
  Synthetic
  misc_feature: 3 consecutive nucleotides at 5' and 3' end modified with 2'-OMe and a 3' PS linkage
  misc_feature (1)..(28): n is a, c, g, or u
  misc_feature (9)..(28): n may or may not be present

SEQ ID NO: 556 - RNA, 96 nt, Artificial Sequence; identical to SEQ ID NO: 456
  Synthetic
  misc_feature: 3 consecutive nucleotides at 5' and 3' end modified with 2'-OMe and a 3' PS linkage
  misc_feature (1)..(28): n is a, c, g, or u
  misc_feature (9)..(28): n may or may not be present

SEQ ID NO: 557 - RNA, 96 nt, Artificial Sequence; identical to SEQ ID NO: 457
  Synthetic
  misc_feature: 3 consecutive nucleotides at 5' and 3' end modified with 2'-OMe and a 3' PS linkage
  misc_feature (1)..(28): n is a, c, g, or u
  misc_feature (9)..(28): n may or may not be present

SEQ ID NO: 558 - RNA, 96 nt, Artificial Sequence; identical to SEQ ID NO: 458
  Synthetic
  misc_feature: 3 consecutive nucleotides at 5' and 3' end modified with 2'-OMe and a 3' PS linkage
  misc_feature (1)..(28): n is a, c, g, or u
  misc_feature (9)..(28): n may or may not be present

SEQ ID NO: 559 - RNA, 96 nt, Artificial Sequence; identical to SEQ ID NO: 459
  Synthetic
  misc_feature: 3 consecutive nucleotides at 5' and 3' end modified with 2'-OMe and a 3' PS linkage
  misc_feature (1)..(28): n is a, c, g, or u
  misc_feature (9)..(28): n may or may not be present

SEQ ID NO: 560 - RNA, 96 nt, Artificial Sequence; identical to SEQ ID NO: 460
  Synthetic
  misc_feature: 3 consecutive nucleotides at 5' and 3' end modified with 2'-OMe and a 3' PS linkage
  misc_feature (1)..(28): n is a, c, g, or u
  misc_feature (9)..(28): n may or may not be present

SEQ ID NO: 561 - RNA, 96 nt, Artificial Sequence; identical to SEQ ID NO: 461
  Synthetic
  misc_feature: 3 consecutive nucleotides at 5' and 3' end modified with 2'-OMe and a 3' PS linkage
  misc_feature (1)..(28): n is a, c, g, or u
  misc_feature (9)..(28): n may or may not be present

SEQ ID NO: 562 - RNA, 96 nt, Artificial Sequence; identical to SEQ ID NO: 462
  Synthetic
  misc_feature: 3 consecutive nucleotides at 5' and 3' end modified with 2'-OMe and a 3' PS linkage
  misc_feature (1)..(28): n is a, c, g, or u
  misc_feature (9)..(28): n may or may not be present

SEQ ID NO: 563 - RNA, 96 nt, Artificial Sequence; identical to SEQ ID NO: 463
  Synthetic
  misc_feature: 3 consecutive nucleotides at 5' and 3' end modified with 2'-OMe and a 3' PS linkage
  misc_feature (1)..(28): n is a, c, g, or u
  misc_feature (9)..(28): n may or may not be present

SEQ ID NO: 564 - RNA, 96 nt, Artificial Sequence; identical to SEQ ID NO: 464
  Synthetic
  misc_feature: 3 consecutive nucleotides at 5' and 3' end modified with 2'-OMe and a 3' PS linkage
  misc_feature (1)..(28): n is a, c, g, or u
  misc_feature (9)..(28): n may or may not be present

SEQ ID NO: 565 - RNA, 96 nt, Artificial Sequence; identical to SEQ ID NO: 465
  Synthetic
  misc_feature: 3 consecutive nucleotides at 5' and 3' end modified with 2'-OMe and a 3' PS linkage
  misc_feature (1)..(28): n is a, c, g, or u
  misc_feature (9)..(28): n may or may not be present

SEQ ID NO: 566 - RNA, 96 nt, Artificial Sequence; identical to SEQ ID NO: 466
  Synthetic
  misc_feature: 3 consecutive nucleotides at 5' and 3' end modified with 2'-OMe and a 3' PS linkage
  misc_feature (1)..(28): n is a, c, g, or u
  misc_feature (9)..(28): n may or may not be present

SEQ ID NO: 567 - RNA, 96 nt, Artificial Sequence; identical to SEQ ID NO: 467
  Synthetic
  misc_feature: 3 consecutive nucleotides at 5' and 3' end modified with 2'-OMe and a 3' PS linkage
  misc_feature (1)..(28): n is a, c, g, or u
  misc_feature (9)..(28): n may or may not be present

SEQ ID NO: 568 - RNA, 96 nt, Artificial Sequence; identical to SEQ ID NO: 468
  Synthetic
  misc_feature: 3 consecutive nucleotides at 5' and 3' end modified with 2'-OMe and a 3' PS linkage
  misc_feature (1)..(28): n is a, c, g, or u
  misc_feature (9)..(28): n may or may not be present

SEQ ID NO: 569 - RNA, 96 nt, Artificial Sequence; identical to SEQ ID NO: 469
  Synthetic
  misc_feature: 3 consecutive nucleotides at 5' and 3' end modified with 2'-OMe and a 3' PS linkage
  misc_feature (1)..(28): n is a, c, g, or u
  misc_feature (9)..(28): n may or may not be present

SEQ ID NO: 570 - RNA, 96 nt, Artificial Sequence; identical to SEQ ID NO: 470
  Synthetic
  misc_feature: 3 consecutive nucleotides at 5' and 3' end modified with 2'-OMe and a 3' PS linkage
  misc_feature (1)..(28): n is a, c, g, or u
  misc_feature (9)..(28): n may or may not be present

SEQ ID NO: 571 - RNA, 96 nt, Artificial Sequence; identical to SEQ ID NO: 471
  Synthetic
  misc_feature: 3 consecutive nucleotides at 5' and 3' end modified with 2'-OMe and a 3' PS linkage
  misc_feature (1)..(28): n is a, c, g, or u
  misc_feature (9)..(28): n may or may not be present

SEQ ID NO: 572 - RNA, 96 nt, Artificial Sequence; identical to SEQ ID NO: 472
  Synthetic
  misc_feature: 3 consecutive nucleotides at 5' and 3' end modified with 2'-OMe and a 3' PS linkage
  misc_feature (1)..(28): n is a, c, g, or u
  misc_feature (9)..(28): n may or may not be present

SEQ ID NO: 573 - RNA, 96 nt, Artificial Sequence; identical to SEQ ID NO: 473
  Synthetic
  misc_feature: 3 consecutive nucleotides at 5' and 3' end modified with 2'-OMe and a 3' PS linkage
  misc_feature (1)..(28): n is a, c, g, or u
  misc_feature (9)..(28): n may or may not be present

SEQ ID NO: 574 - RNA, 96 nt, Artificial Sequence; identical to SEQ ID NO: 473
  Synthetic
  misc_feature: 3 consecutive nucleotides at 5' and 3' end modified with 2'-OMe and a 3' PS linkage
  misc_feature (1)..(28): n is a, c, g, or u
  misc_feature (9)..(28): n may or may not be present

SEQ ID NO: 575 - RNA, 96 nt, Artificial Sequence; identical to SEQ ID NO: 473
  Synthetic
  misc_feature: 3 consecutive nucleotides at 5' and 3' end modified with 2'-OMe and a 3' PS linkage
  misc_feature (1)..(28): n is a, c, g, or u
  misc_feature (9)..(28): n may or may not be present

SEQ ID NO: 576 - RNA, 96 nt, Artificial Sequence; identical to SEQ ID NO: 473
  Synthetic
  misc_feature: 3 consecutive nucleotides at 5' and 3' end modified with 2'-OMe and a 3' PS linkage
  misc_feature (1)..(28): n is a, c, g, or u
  misc_feature (9)..(28): n may or may not be present

SEQ ID NO: 577 - RNA, 96 nt, Artificial Sequence; identical to SEQ ID NO: 473
  Synthetic
  misc_feature: 3 consecutive nucleotides at 5' and 3' end modified with 2'-OMe and a 3' PS linkage
  misc_feature (1)..(28): n is a, c, g, or u
  misc_feature (9)..(28): n may or may not be present

SEQ ID NO: 578 - RNA, 96 nt, Artificial Sequence; identical to SEQ ID NO: 473
  Synthetic
  misc_feature: 3 consecutive nucleotides at 5' and 3' end modified with 2'-OMe and a 3' PS linkage
  misc_feature (1)..(28): n is a, c, g, or u
  misc_feature (9)..(28): n may or may not be present

SEQ ID NO: 579 - RNA, 96 nt, Artificial Sequence; identical to SEQ ID NO: 473
  Synthetic
  misc_feature: 3 consecutive nucleotides at 5' and 3' end modified with 2'-OMe and a 3' PS linkage
  misc_feature (1)..(28): n is a, c, g, or u
  misc_feature (9)..(28): n may or may not be present

SEQ ID NO: 580 - RNA, 96 nt, Artificial Sequence; identical to SEQ ID NO: 473
  Synthetic
  misc_feature: 3 consecutive nucleotides at 5' and 3' end modified with 2'-OMe and a 3' PS linkage
  misc_feature (1)..(28): n is a, c, g, or u
  misc_feature (9)..(28): n may or may not be present

SEQ ID NO: 581 - RNA, 98 nt, Artificial Sequence; identical to SEQ ID NO: 407
  Synthetic
  misc_feature: 3 consecutive nucleotides at 5' and 3' end modified with 2'-OMe and a 3' PS linkage; plus some nucleotides mid sequence modified with 2'-OMe
  misc_feature (1)..(28): n is a, c, g, or u
  misc_feature (9)..(28): n may or may not be present

SEQ ID NO: 582 - RNA, 97 nt, Artificial Sequence; identical to SEQ ID NO: 408
  Synthetic
  misc_feature: 3 consecutive nucleotides at 5' and 3' end modified with 2'-OMe and a 3' PS linkage; plus some nucleotides mid sequence modified with 2'-OMe
  misc_feature (1)..(28): n is a, c, g, or u
  misc_feature (9)..(28): n may or may not be present

SEQ ID NO: 583 - RNA, 96 nt, Artificial Sequence; identical to SEQ ID NO: 411
  Synthetic
  misc_feature: 3 consecutive nucleotides at 5' and 3' end modified with 2'-OMe and a 3' PS linkage; plus some nucleotides mid sequence modified with 2'-OMe
  misc_feature (1)..(28): n is a, c, g, or u
  misc_feature (9)..(28): n may or may not be present

SEQ ID NO: 584 - RNA, 96 nt, Artificial Sequence; identical to SEQ ID NO: 412
  Synthetic
  misc_feature: 3 consecutive nucleotides at 5' and 3' end modified with 2'-OMe and a 3' PS linkage; plus some nucleotides mid sequence modified with 2'-OMe
  misc_feature (1)..(28): n is a, c, g, or u
  misc_feature (9)..(28): n may or may not be present

SEQ ID NO: 585 - RNA, 95 nt, Artificial Sequence; identical to SEQ ID NO: 485
  Synthetic
  misc_feature: 3 consecutive nucleotides at 5' and 3' end modified with 2'-OMe and a 3' PS linkage
  misc_feature (1)..(28): n is a, c, g, or u
  misc_feature (9)..(28): n may or may not be present

SEQ ID NO: 586 - RNA, 94 nt, Artificial Sequence; identical to SEQ ID NO: 486
  Synthetic
  misc_feature: 3 consecutive nucleotides at 5' and 3' end modified with 2'-OMe and a 3' PS linkage
  misc_feature (1)..(28): n is a, c, g, or u
  misc_feature (9)..(28): n may or may not be present

SEQ ID NO: 587 - RNA, 92 nt, Artificial Sequence; identical to SEQ ID NO: 487
  Synthetic
  misc_feature: 3 consecutive nucleotides at 5' and 3' end modified with 2'-OMe and a 3' PS linkage
  misc_feature (1)..(28): n is a, c, g, or u
  misc_feature (9)..(28): n may or may not be present

SEQ ID NO: 588 - RNA, 91 nt, Artificial Sequence; identical to SEQ ID NO: 488
  Synthetic
  misc_feature: 3 consecutive nucleotides at 5' and 3' end modified with 2'-OMe and a 3' PS linkage
  misc_feature (1)..(28): n is a, c, g, or u
  misc_feature (9)..(28): n may or may not be present

SEQ ID NO: 589 - RNA, 92 nt, Artificial Sequence; identical to SEQ ID NO: 423
  Synthetic
  misc_feature: 3 consecutive nucleotides at 5' and 3' end modified with 2'-OMe and a 3' PS linkage; plus some nucleotides mid sequence modified with 2'-OMe
  misc_feature (1)..(28): n is a, c, g, or u
  misc_feature (9)..(28): n may or may not be present

SEQ ID NO: 590 - RNA, 94 nt, Artificial Sequence; identical to SEQ ID NO: 490
  Synthetic
  misc_feature: 3 consecutive nucleotides at 5' and 3' end modified with 2'-OMe and a 3' PS linkage; plus some nucleotides mid sequence modified with 2'-OMe
  misc_feature (1)..(28): n is a, c, g, or u
  misc_feature (9)..(28): n may or may not be present

SEQ ID NO: 591 - RNA, 98 nt, Artificial Sequence; identical to SEQ ID NO: 407
  Synthetic
  misc_feature: 3 consecutive nucleotides at 5' and 3' end modified with 2'-OMe and a 3' PS linkage; plus some nucleotides mid sequence modified with 2'-OMe
  misc_feature (1)..(28): n is a, c, g, or u
  misc_feature (9)..(28): n may or may not be present

SEQ ID NO: 592 - RNA, 96 nt, Artificial Sequence; identical to SEQ ID NO: 412
  Synthetic
  misc_feature: 3 consecutive nucleotides at 5' and 3' end modified with 2'-OMe and a 3' PS linkage; plus some nucleotides mid sequence modified with 2'-OMe
  misc_feature (1)..(28): n is a, c, g, or u
  misc_feature (9)..(28): n may or may not be present

SEQ ID NO: 593 - RNA, 98 nt, Artificial Sequence; identical to SEQ ID NO: 407
  Synthetic
  misc_feature: 3 consecutive nucleotides at 5' and 3' end modified with 2'-OMe and a 3' PS linkage; plus some nucleotides mid sequence modified with 2'-OMe
  misc_feature (1)..(28): n is a, c, g, or u
  misc_feature (9)..(28): n may or may not be present

SEQ ID NO: 594 - RNA, 96 nt, Artificial Sequence; identical to SEQ ID NO: 412
  Synthetic
  misc_feature: 3 consecutive nucleotides at 5' and 3' end modified with 2'-OMe and a 3' PS linkage; plus some nucleotides mid sequence modified with 2'-OMe
  misc_feature (1)..(28): n is a, c, g, or u
  misc_feature (9)..(28): n may or may not be present

SEQ ID NO: 595-600 - skipped (6 entries)

SEQ ID NO: 601 - RNA, 88 nt, Artificial Sequence
  Synthetic
  misc_feature (1)..(20): n is a, c, g, or u
nnnnnnnnnnnnnnnnnnnnguuuuagagcuagaaauagcaaguuaaaauaaggcuaguccguuaucaacuaagcaccgagucggugc

SEQ ID NO: 602 - RNA, 88 nt, Artificial Sequence
  Synthetic
  misc_feature (1)..(20): n is a, c, g, or u
nnnnnnnnnnnnnnnnnnnnguuuuagagcuagaaauagcaaguuaaaauaaggcuaguccguuaucaacucagcaccgagucggugc

SEQ ID NO: 603 - RNA, 88 nt, Artificial Sequence
  Synthetic
  misc_feature (1)..(20): n is a, c, g, or u
nnnnnnnnnnnnnnnnnnnnguuuuagagcuagaaauagcaaguuaaaauaaggcuaguccguuauccacuuggcaccgagucggugc

SEQ ID NO: 604 - RNA, 88 nt, Artificial Sequence
  Synthetic
  misc_feature (1)..(20): n is a, c, g, or u
nnnnnnnnnnnnnnnnnnnnguuuuagagcuagaaauagcaaguuaaaauacggcuaguccguuaucaacuuggcaccgagucggugc

SEQ ID NO: 605 - RNA, 90 nt, Artificial Sequence
  Synthetic
  misc_feature (1)..(20): n is a, c, g, or u
nnnnnnnnnnnnnnnnnnnnguuuuagagcuagaaauagcaaguuaaaauaaggcuaguccguuaucaagagcuggcaccgagucggugc

SEQ ID NO: 606 - RNA, 90 nt, Artificial Sequence
  Synthetic
  misc_feature (1)..(20): n is a, c, g, or u
nnnnnnnnnnnnnnnnnnnnguuuuagagcuagaaauagcaaguuaaaauaaggcuaguccguuaucaagaaauggcaccgagucggugc

SEQ ID NO: 607 - RNA, 90 nt, Artificial Sequence
  Synthetic
  misc_feature (1)..(20): n is a, c, g, or u
nnnnnnnnnnnnnnnnnnnnguuuuagagcuagaaauagcaaguuaaaauaaggcuaguccguuaucacgaaagggcaccgagucggugc

SEQ ID NO: 608 - RNA, 89 nt, Artificial Sequence
  Synthetic
  misc_feature (1)..(20): n is a, c, g, or u
nnnnnnnnnnnnnnnnnnnnguuuuagagcuagaaauagcaaguuaaaauaaggcuaguccguuaucaaaaauggcaccgagucggugc

SEQ ID NO: 609 - RNA, 89 nt, Artificial Sequence
  Synthetic
  misc_feature (1)..(20): n is a, c, g, or u
nnnnnnnnnnnnnnnnnnnnguuuuagagcuagaaauagcaaguuaaaauaaggcuaguccguuaucaaaaguggcaccgagucggugc

SEQ ID NO: 610 - RNA, 89 nt, Artificial Sequence
  Synthetic
  misc_feature (1)..(20): n is a, c, g, or u
nnnnnnnnnnnnnnnnnnnnguuuuagagcuagaaauagcaaguuaaaauaaggcuaguccguuaucaacaguggcaccgagucggugc

SEQ ID NO: 611 - RNA, 88 nt, Artificial Sequence
  Synthetic
  misc_feature (1)..(20): n is a, c, g, or u
nnnnnnnnnnnnnnnnnnnnguuuuagagcuagaaauagcaaguuaaaauaaggcuaguccguuaucacaagggcaccgagucggugc

SEQ ID NO: 612 - RNA, 88 nt, Artificial Sequence
  Synthetic
  misc_feature (1)..(20): n is a, c, g, or u
nnnnnnnnnnnnnnnnnnnnguuuuagagcuagaaauagcaaguuaaaauaaggcuaguccguuaucaaaauggcaccgagucggugc

SEQ ID NO: 613 - RNA, 86 nt, Artificial Sequence
  Synthetic
  misc_feature (1)..(20): n is a, c, g, or u
nnnnnnnnnnnnnnnnnnnnguuuuagagcuagaaauagcaaguuaaaauaaggcuaguccguuaucaaaggcaccgagucggugc

SEQ ID NO: 614 - RNA, 86 nt, Artificial Sequence
  Synthetic
  misc_feature (1)..(20): n is a, c, g, or u
nnnnnnnnnnnnnnnnnnnnguuuuagagcuagaaauagcaaguuaaaauaaggcuaguccguuaucaagggcaccgagucggugc

SEQ ID NO: 615 - RNA, 84 nt, Artificial Sequence
  Synthetic
  misc_feature (1)..(20): n is a, c, g, or u
nnnnnnnnnnnnnnnnnnnnguuuuagagcuagaaauagcaaguuaaaauaaggcuaguccguuaucaggcaccgagucggugc

SEQ ID NO: 616 - RNA, 87 nt, Artificial Sequence
  Synthetic
  misc_feature (1)..(20): n is a, c, g, or u
nnnnnnnnnnnnnnnnnnnnguuuuagagcuagaauagcaaguuaaaauaaggcuaguccguuaucaacuuggcaccgagucggugc

SEQ ID NO: 617 - RNA, 87 nt, Artificial Sequence
  Synthetic
  misc_feature (1)..(20): n is a, c, g, or u
nnnnnnnnnnnnnnnnnnnnguuuuagagcgcaaagcgcaaguuaaaauaaggcuaguccguuaucaacuuggcaccgagucggugc

SEQ ID NO: 618 - RNA, 87 nt, Artificial Sequence
  Synthetic
  misc_feature (1)..(20): n is a, c, g, or u
nnnnnnnnnnnnnnnnnnnnguuuuagagcgcgaagcgcaaguuaaaauaaggcuaguccguuaucaacuuggcaccgagucggugc

SEQ ID NO: 619 - RNA, 87 nt, Artificial Sequence
  Synthetic
  misc_feature (1)..(20): n is a, c, g, or u
nnnnnnnnnnnnnnnnnnnnguuuuagagcggaaacgcaaguuaaaauaaggcuaguccguuaucaacuuggcaccgagucggugcu

SEQ ID NO: 620 - RNA, 86 nt, Artificial Sequence
  Synthetic
  misc_feature (1)..(20): n is a, c, g, or u
nnnnnnnnnnnnnnnnnnnnguuuuagagcggaaacgcaaguuaaaauaaggcuaguccguuaucaacuuggcaccgagucggugc

SEQ ID NO: 621 - RNA, 86 nt, Artificial Sequence
  Synthetic
  misc_feature (1)..(20): n is a, c, g, or u
nnnnnnnnnnnnnnnnnnnnguuuuagagccgaaaggcaaguuaaaauaaggcuaguccguuaucaacuuggcaccgagucggugc

SEQ ID NO: 622 - RNA, 86 nt, Artificial Sequence
  Synthetic
  misc_feature (1)..(20): n is a, c, g, or u
nnnnnnnnnnnnnnnnnnnnguuuuagagcugaaaagcaaguuaaaauaaggcuaguccguuaucaacuuggcaccgagucggugc

SEQ ID NO: 623 - RNA, 84 nt, Artificial Sequence
  Synthetic
  misc_feature (1)..(20): n is a, c, g, or u
nnnnnnnnnnnnnnnnnnnnguuuuagagcgaaagcaaguuaaaauaaggcuaguccguuaucaacuuggcaccgagucggugc

SEQ ID NO: 624 - RNA, 83 nt, Artificial Sequence
  Synthetic
  misc_feature (1)..(20): n is a, c, g, or u
nnnnnnnnnnnnnnnnnnnnguuuuagagcgaagcaaguuaaaauaaggcuaguccguuaucaacuuggcaccgagucggugc

SEQ ID NO: 625 - RNA, 83 nt, Artificial Sequence
  Synthetic
  misc_feature (1)..(20): n is a, c, g, or u
nnnnnnnnnnnnnnnnnnnnguuuuagagcaaagcaaguuaaaauaaggcuaguccguuaucaacuuggcaccgagucggugc

SEQ ID NO: 626 - RNA, 82 nt, Artificial Sequence
  Synthetic
  misc_feature (1)..(20): n is a, c, g, or u
nnnnnnnnnnnnnnnnnnnnguuuuagaggaaacaaguuaaaauaaggcuaguccguuaucaacuuggcaccgagucggugc

SEQ ID NO: 627 - RNA, 82 nt, Artificial Sequence
  Synthetic
  misc_feature (1)..(20): n is a, c, g, or u
nnnnnnnnnnnnnnnnnnnnguuuuagagcaagcaaguuaaaauaaggcuaguccguuaucaacuuggcaccgagucggugc

SEQ ID NO: 628 - RNA, 82 nt, Artificial Sequence
  Synthetic
  misc_feature (1)..(20): n is a, c, g, or u
nnnnnnnnnnnnnnnnnnnnguuuuagagcgagcaaguuaaaauaaggcuaguccguuaucaacuuggcaccgagucggugc

SEQ ID NO: 629 - RNA, 80 nt, Artificial Sequence
  Synthetic
  misc_feature (1)..(20): n is a, c, g, or u
nnnnnnnnnnnnnnnnnnnnguuuuagagcgcaaguuaaaauaaggcuaguccguuaucaacuuggcaccgagucggugc

SEQ ID NO: 630 - RNA, 80 nt, Artificial Sequence
  Synthetic
  misc_feature (1)..(20): n is a, c, g, or u
nnnnnnnnnnnnnnnnnnnnguuuuagagaacaaguuaaaauaaggcuaguccguuaucaacuuggcaccgagucggugc

SEQ ID NO: 631 - RNA, 79 nt, Artificial Sequence
  Synthetic
  misc_feature (1)..(20): n is a, c, g, or u
nnnnnnnnnnnnnnnnnnnnguuuuagagacaaguuaaaauaaggcuaguccguuaucaacuuggcaccgagucggugc

SEQ ID NO: 632 - RNA, 78 nt, Artificial Sequence
  Synthetic
  misc_feature (1)..(20): n is a, c, g, or u
nnnnnnnnnnnnnnnnnnnnguuuuagagcaaguuaaaauaaggcuaguccguuaucaacuuggcaccgagucggugc

SEQ ID NO: 633 - RNA, 78 nt, Artificial Sequence
  Synthetic
  misc_feature (1)..(20): n is a, c, g, or u
nnnnnnnnnnnnnnnnnnnnguuuuagaaaaaguuaaaauaaggcuaguccguuaucaacuuggcaccgagucggugc

SEQ ID NO: 634 - RNA, 77 nt, Artificial Sequence
  Synthetic
  misc_feature (1)..(20): n is a, c, g, or u
nnnnnnnnnnnnnnnnnnnnguuuuagaaaaguuaaaauaaggcuaguccguuaucaacuuggcaccgagucggugc

SEQ ID NO: 635 - RNA, 87 nt, Artificial Sequence
  Synthetic
  misc_feature (1)..(20): n is a, c, g, or u
nnnnnnnnnnnnnnnnnnnnguuuuagagcuagaaauagcaaguuaaaauaaggcuaguccguuaucaacuuggcaccgagucggug

SEQ ID NO: 636 - RNA, 86 nt, Artificial Sequence
  Synthetic
  misc_feature (1)..(20): n is a, c, g, or u
nnnnnnnnnnnnnnnnnnnnguuuuagagcuagaaauagcaaguuaaaauaaggcuaguccguuaucaacuuggcaccgagucggu

SEQ ID NO: 637 - RNA, 85 nt, Artificial Sequence
  Synthetic
  misc_feature (1)..(20): n is a, c, g, or u
nnnnnnnnnnnnnnnnnnnnguuuuagagcuagaaauagcaaguuaaaauaaggcuaguccguuaucaacuuggcaccgagucgg

SEQ ID NO: 638 - RNA, 84 nt, Artificial Sequence
  Synthetic
  misc_feature (1)..(20): n is a, c, g, or u
nnnnnnnnnnnnnnnnnnnnguuuuagagcuagaaauagcaaguuaaaauaaggcuaguccguuaucaacuuggcaccgagucg

SEQ ID NO: 639 - RNA, 83 nt, Artificial Sequence
  Synthetic
  misc_feature (1)..(20): n is a, c, g, or u
nnnnnnnnnnnnnnnnnnnnguuuuagagcuagaaauagcaaguuaaaauaaggcuaguccguuaucaacuuggcaccgaguc

SEQ ID NO: 640 - RNA, 82 nt, Artificial Sequence
  Synthetic
  misc_feature (1)..(20): n is a, c, g, or u
nnnnnnnnnnnnnnnnnnnnguuuuagagcuagaaauagcaaguuaaaauaaggcuaguccguuaucaacuuggcaccgagu

SEQ ID NO: 641 - RNA, 82 nt, Artificial Sequence
  Synthetic
  misc_feature (1)..(20): n is a, c, g, or u
nnnnnnnnnnnnnnnnnnnnguuuuagagcgaaagcaaguuaaaauaaggcuaguccguuaucacuggcaccgagucggugc

SEQ ID NO: 642 - RNA, 80 nt, Artificial Sequence
  Synthetic
  misc_feature (1)..(20): n is a, c, g, or u
nnnnnnnnnnnnnnnnnnnnguuuuagagcgaaagcaaguuaaaauaaggcuaguccguuaucaggcaccgagucggugc

SEQ ID NO: 643 - RNA, 80 nt, Artificial Sequence
  Synthetic
  misc_feature (1)..(20): n is a, c, g, or u
nnnnnnnnnnnnnnnnnnnnguuuuagagaaaaaguuaaaauaaggcuaguccguuaucaacuuggcaccgagucggugc

SEQ ID NO: 644 - RNA, 80 nt, Artificial Sequence
  Synthetic
  misc_feature (1)..(20): n is a, c, g, or u
nnnnnnnnnnnnnnnnnnnnguuuuagaggaaacaaguuaaaauaaggcuaguccguuaucaauggcaccgagucggugc

SEQ ID NO: 645 - RNA, 78 nt, Artificial Sequence
  Synthetic
  misc_feature (1)..(20): n is a, c, g, or u
nnnnnnnnnnnnnnnnnnnnguuuuagagaaaaaguuaaaauaaggcuaguccguuaucaauggcaccgagucggugc

SEQ ID NO: 646 - RNA, 80 nt, Artificial Sequence
  Synthetic
  misc_feature (1)..(20): n is a, c, g, or u
nnnnnnnnnnnnnnnnnnnnguuuuagaggaaacaaguuaaaauaaggcuaguccguuaucacuggcaccgagucggugc

SEQ ID NO: 647 - RNA, 76 nt, Artificial Sequence
  Synthetic
  misc_feature (1)..(20): n is a, c, g, or u
nnnnnnnnnnnnnnnnnnnnguuuuagagaaaaaguuaaaauaaggcuaguccguuaucaggcaccgagucggugc

SEQ ID NO: 648 - RNA, 86 nt, Artificial Sequence
  Synthetic
  misc_feature (1)..(20): n is a, c, g, or u
nnnnnnnnnnnnnnnnnnnnguuuuagagcgaaagcaaguuaaaauaaggcuaguccguuaucaagcuauggcaccgagucggugc

SEQ ID NO: 649 - RNA, 87 nt, Artificial Sequence
  Synthetic
  misc_feature (1)..(20): n is a, c, g, or u
nnnnnnnnnnnnnnnnnnnnguuuuagagcuagaaauagcaaguuaaaauaaggcaguccguuaucaacuuggcaccgagucggugc

SEQ ID NO: 650 - RNA, 87 nt, Artificial Sequence
  Synthetic
  misc_feature (1)..(20): n is a, c, g, or u
nnnnnnnnnnnnnnnnnnnnguuuuagagcuagaaauagcaaguuaaaauaaggcuguccguuaucaacuuggcaccgagucggugc

SEQ ID NO: 651 - RNA, 86 nt, Artificial Sequence
  Synthetic
  misc_feature (1)..(20): n is a, c, g, or u
nnnnnnnnnnnnnnnnnnnnguuuuagagcuagaaauagcaaguuaaaauaaggcguccguuaucaacuuggcaccgagucggugc

SEQ ID NO: 652 - RNA, 86 nt, Artificial Sequence
  Synthetic
  misc_feature (1)..(20): n is a, c, g, or u
nnnnnnnnnnnnnnnnnnnnguuuuagagcuagaaauagcaaguuaaaauaagguauccguuaucaacuuggcaccgagucggugc

SEQ ID NO: 653 - RNA, 85 nt, Artificial Sequence
  Synthetic
  misc_feature (1)..(20): n is a, c, g, or u
nnnnnnnnnnnnnnnnnnnnguuuuagagcuagaaauagcaaguuaaaauaagguuccguuaucaacuuggcaccgagucggugc

SEQ ID NO: 654 - RNA, 85 nt, Artificial Sequence
  Synthetic
  misc_feature (1)..(20): n is a, c, g, or u
nnnnnnnnnnnnnnnnnnnnguuuuagagcuagaaauagcaaguuaaaauaaggauccguuaucaacuuggcaccgagucggugc

SEQ ID NO: 655 - RNA, 88 nt, Artificial Sequence
  Synthetic
  misc_feature (1)..(20): n is a, c, g, or u
nnnnnnnnnnnnnnnnnnnnguuuucgagcuagaaauagcaagugaaaauaaggcuaguccguuaucaacuuggcaccgagucggugc

SEQ ID NO: 656 - RNA, 88 nt, Artificial Sequence
  Synthetic
  misc_feature (1)..(20): n is a, c, g, or u
nnnnnnnnnnnnnnnnnnnnguuuuugagcuagaaauagcaaguaaaaauaaggcuaguccguuaucaacuuggcaccgagucggugc

SEQ ID NO: 657 - RNA, 88 nt, Artificial Sequence
  Synthetic
  misc_feature (1)..(20): n is a, c, g, or u
nnnnnnnnnnnnnnnnnnnnguuuuagagcgagaaaucgcaaguuaaaauaaggcuaguccguuaucaacuuggcaccgagucggugc

SEQ ID NO: 658 - RNA, 88 nt, Artificial Sequence
  Synthetic
  misc_feature (1)..(20): n is a, c, g, or u
nnnnnnnnnnnnnnnnnnnnguuuuagagcuagaaauagcgaguuaaaauaaggcuaguccguuaucaacuuggcaccgagucggugc

SEQ ID NO: 659 - RNA, 88 nt, Artificial Sequence
  Synthetic
  misc_feature (1)..(20): n is a, c, g, or u
nnnnnnnnnnnnnnnnnnnnguuuuagagcuagaaauagccgguuaaaauaaggcuaguccguuaucaacuuggcaccgagucggugc

SEQ ID NO: 660 - RNA, 88 nt, Artificial Sequence
  Synthetic
  misc_feature (1)..(20): n is a, c, g, or u
nnnnnnnnnnnnnnnnnnnnguuuuagagcuagaaauagcaaguuaaaaugaggcuaguccguuaucaacuuggcaccgagucggugc

SEQ ID NO: 661 - RNA, 88 nt, Artificial Sequence
  Synthetic
  misc_feature (1)..(20): n is a, c, g, or u
nnnnnnnnnnnnnnnnnnnnguuuuagagcuagaaauagcaaguuaaaauaaggcugguccguuaucaacuuggcaccgagucggugc

SEQ ID NO: 662 - RNA, 88 nt, Artificial Sequence
  Synthetic
  misc_feature (1)..(20): n is a, c, g, or u
nnnnnnnnnnnnnnnnnnnnguuuuagagcuagaaauagcaaguuaaaauaaggcucguccguuaucaacuuggcaccgagucggugc

SEQ ID NO: 663 - RNA, 88 nt, Artificial Sequence
  Synthetic
  misc_feature (1)..(20): n is a, c, g, or u
nnnnnnnnnnnnnnnnnnnnguuuuagagcuagaaauagcaaguuaaaauaaggcuuguccguuaucaacuuggcaccgagucggugc

SEQ ID NO: 664 - RNA, 88 nt, Artificial Sequence
  Synthetic
  misc_feature (1)..(20): n is a, c, g, or u
nnnnnnnnnnnnnnnnnnnnguuuuagagcuagaaauagcaaguuaaaauaaggcuaguccguugucaacuuggcaccgagucggugc

SEQ ID NO: 665 - RNA, 88 nt, Artificial Sequence
  Synthetic
  misc_feature (1)..(20): n is a, c, g, or u
nnnnnnnnnnnnnnnnnnnnguuuuagagcuagaaauagcaaguuaaaauaaggcuaguccguucucaacuuggcaccgagucggugc

SEQ ID NO: 666 - RNA, 88 nt, Artificial Sequence
  Synthetic
  misc_feature (1)..(20): n is a, c, g, or u
nnnnnnnnnnnnnnnnnnnnguuuuagagcuagaaauagcaaguuaaaauaaggcuaguccguuuucaacuuggcaccgagucggugc

SEQ ID NO: 667 - RNA, 88 nt, Artificial Sequence
  Synthetic
  misc_feature (1)..(20): n is a, c, g, or u
nnnnnnnnnnnnnnnnnnnnguuuuagagcuagaaauagcaaguuaaaauaaggcuaguccguuaugaacuuggcaccgagucggugc

SEQ ID NO: 668 - RNA, 88 nt, Artificial Sequence
  Synthetic
  misc_feature (1)..(20): n is a, c, g, or u
nnnnnnnnnnnnnnnnnnnnguuuuagagcuagaaauagcaaguuaaaauaaggcuaguccguuaucaacuugggaccgagucggucc

SEQ ID NO: 669 - RNA, 88 nt, Artificial Sequence
  Synthetic
  misc_feature (1)..(20): n is a, c, g, or u
nnnnnnnnnnnnnnnnnnnnguuuuagagcuagaaauagcaaguuaaaauaaggcuaguccguuaucaacuuggaaccgagucgguuc

SEQ ID NO: 670 - RNA, 88 nt, Artificial Sequence
  Synthetic
  misc_feature (1)..(20): n is a, c, g, or u
nnnnnnnnnnnnnnnnnnnnguuuucgagcgagaaaucgcgagugaaaaugaggcugguccguugugaacuuggaaccgagucgguuc

SEQ ID NO: 671 - RNA, 88 nt, Artificial Sequence
  Synthetic
  misc_feature (1)..(20): n is a, c, g, or u
nnnnnnnnnnnnnnnnnnnnguuuuugagcgagaaaucgcaaguaaaaauaaggcucguccguucugaacuuggaaccgagucgguuc

SEQ ID NO: 672 - RNA, 88 nt, Artificial Sequence
  Synthetic
  misc_feature (1)..(20): n is a, c, g, or u
nnnnnnnnnnnnnnnnnnnnguuucggagccggaaacggcgagucgaaaugaggcugguccguugucggcucggaaccgagucgguuc

SEQ ID NO: 673 - RNA, 88 nt, Artificial Sequence
  Synthetic
  misc_feature (1)..(20): n is a, c, g, or u
nnnnnnnnnnnnnnnnnnnnguuuuagagcuagaaauagcaaguuaaaauaaggcuaguccguuaucaacuuggcaccgagucggugc

SEQ ID NO: 674 - RNA, 88 nt, Artificial Sequence; identical to SEQ ID NO: 673
  Synthetic
  misc_feature (1)..(20): n is a, c, g, or u

SEQ ID NO: 675 - RNA, 88 nt, Artificial Sequence; identical to SEQ ID NO: 673
  Synthetic
  misc_feature (1)..(20): n is a, c, g, or u

SEQ ID NO: 676 - RNA, 88 nt, Artificial Sequence; identical to SEQ ID NO: 673
  Synthetic
  misc_feature (1)..(20): n is a, c, g, or u

SEQ ID NO: 677 - RNA, 88 nt, Artificial Sequence; identical to SEQ ID NO: 673
  Synthetic
  misc_feature (1)..(20): n is a, c, g, or u

SEQ ID NO: 678 - RNA, 88 nt, Artificial Sequence; identical to SEQ ID NO: 673
  Synthetic
  misc_feature (1)..(20): n is a, c, g, or u

SEQ ID NO: 679 - RNA, 88 nt, Artificial Sequence; identical to SEQ ID NO: 673
  Synthetic
  misc_feature (1)..(20): n is a, c, g, or u

SEQ ID NO: 680 - RNA, 88 nt, Artificial Sequence; identical to SEQ ID NO: 673
  Synthetic
  misc_feature (1)..(20): n is a, c, g, or u

SEQ ID NO: 681 - RNA, 90 nt, Artificial Sequence; identical to SEQ ID NO: 607
  Synthetic
  misc_feature (1)..(20): n is a, c, g, or u

SEQ ID NO: 682 - RNA, 89 nt, Artificial Sequence; identical to SEQ ID NO: 608
  Synthetic
  misc_feature (1)..(20): n is a, c, g, or u

SEQ ID NO: 683 - RNA, 88 nt, Artificial Sequence; identical to SEQ ID NO: 611
  Synthetic
  misc_feature (1)..(20): n is a, c, g, or u

SEQ ID NO: 684 - RNA, 88 nt, Artificial Sequence; identical to SEQ ID NO: 612
  Synthetic
  misc_feature (1)..(20): n is a, c, g, or u

SEQ ID NO: 685 - RNA, 87 nt, Artificial Sequence
  Synthetic
  misc_feature (1)..(20): n is a, c, g, or u
nnnnnnnnnnnnnnnnnnnnguuuuagagcgcgaagcgcaaguuaaaauaaggcuaguccguuaucaaaauggcaccgagucggugc

SEQ ID NO: 686 - RNA, 86 nt, Artificial Sequence
  Synthetic
  misc_feature (1)..(20): n is a, c, g, or u
nnnnnnnnnnnnnnnnnnnnguuuuagagcugaaaagcaaguuaaaauaaggcuaguccguuaucaaaauggcaccgagucggugc

SEQ ID NO: 687 - RNA, 84 nt, Artificial Sequence
  Synthetic
  misc_feature (1)..(20): n is a, c, g, or u
nnnnnnnnnnnnnnnnnnnnguuuuagagcgaaagcaaguuaaaauaaggcuaguccguuaucaaaauggcaccgagucggugc

SEQ ID NO: 688 - RNA, 83 nt, Artificial Sequence
  Synthetic
  misc_feature (1)..(20): n is a, c, g, or u
nnnnnnnnnnnnnnnnnnnnguuuuagagcaaagcaaguuaaaauaaggcuaguccguuaucaaaauggcaccgagucggugc

SEQ ID NO: 689 - RNA, 84 nt, Artificial Sequence; identical to SEQ ID NO: 623
  Synthetic
  misc_feature (1)..(20): n is a, c, g, or u

SEQ ID NO: 690 - RNA, 86 nt, Artificial Sequence
  Synthetic
  misc_feature (1)..(20): n is a, c, g, or u
nnnnnnnnnnnnnnnnnnnnguuuuagagcgaaagcaaguuaaaauaaggcuaguccguuaucaagaaauggcaccgagucggugc

SEQ ID NO: 691 - RNA, 98 nt, Artificial Sequence; identical to SEQ ID NO: 407
  Synthetic
  misc_feature (1)..(28): n is a, c, g, or u
  misc_feature (9)..(28): n may or may not be present

SEQ ID NO: 692 - RNA, 96 nt, Artificial Sequence; identical to SEQ ID NO: 412
  Synthetic
  misc_feature (1)..(28): n is a, c, g, or u
  misc_feature (9)..(28): n may or may not be present

SEQ ID NO: 693 - RNA, 98 nt, Artificial Sequence; identical to SEQ ID NO: 407
  Synthetic
  misc_feature (1)..(28): n is a, c, g, or u
  misc_feature (9)..(28): n may or may not be present

SEQ ID NO: 694 - RNA, 96 nt, Artificial Sequence; identical to SEQ ID NO: 412
  Synthetic
  misc_feature (1)..(28): n is a, c, g, or u
  misc_feature (9)..(28): n may or may not be present

SEQ ID NO: 695 - RNA, 90 nt, Artificial Sequence; identical to SEQ ID NO: 7
  Synthetic

SEQ ID NO: 696 - RNA, 88 nt, Artificial Sequence; identical to SEQ ID NO: 12
  Synthetic

SEQ ID NO: 697 - RNA, 90 nt, Artificial Sequence; identical to SEQ ID NO: 7
  Synthetic

SEQ ID NO: 698 - RNA, 88 nt, Artificial Sequence; identical to SEQ ID NO: 12
  Synthetic

SEQ ID NO: 699-700 - skipped (2 entries)

SEQ ID NO: 701 - RNA, 88 nt, Artificial Sequence; identical to SEQ ID NO: 601
  Synthetic
  misc_feature: 3 consecutive nucleotides at 5' and 3' end modified with 2'-OMe and a 3' PS linkage
  misc_feature (1)..(20): n is a, c, g, or u

SEQ ID NO: 702 - RNA, 88 nt, Artificial Sequence; identical to SEQ ID NO: 602
  Synthetic
  misc_feature: 3 consecutive nucleotides at 5' and 3' end modified with 2'-OMe and a 3' PS linkage
  misc_feature (1)..(20): n is a, c, g, or u

SEQ ID NO: 703 - RNA, 88 nt, Artificial Sequence; identical to SEQ ID NO: 603
  Synthetic
  misc_feature: 3 consecutive nucleotides at 5' and 3' end modified with 2'-OMe and a 3' PS linkage
  misc_feature (1)..(20): n is a, c, g, or u

SEQ ID NO: 704 - RNA, 88 nt, Artificial Sequence; identical to SEQ ID NO: 604
  Synthetic
  misc_feature: 3 consecutive nucleotides at 5' and 3' end modified with 2'-OMe and a 3' PS linkage
  misc_feature (1)..(20): n is a, c, g, or u

SEQ ID NO: 705 - RNA, 90 nt, Artificial Sequence; identical to SEQ ID NO: 605
  Synthetic
  misc_feature: 3 consecutive nucleotides at 5' and 3' end modified with 2'-OMe and a 3' PS linkage
  misc_feature (1)..(20): n is a, c, g, or u

SEQ ID NO: 706 - RNA, 90 nt, Artificial Sequence; identical to SEQ ID NO: 606
  Synthetic
  misc_feature: 3 consecutive nucleotides at 5' and 3' end modified with 2'-OMe and a 3' PS linkage
  misc_feature (1)..(20): n is a, c, g, or u

SEQ ID NO: 707 - RNA, 90 nt, Artificial Sequence; identical to SEQ ID NO: 607
  Synthetic
  misc_feature: 3 consecutive nucleotides at 5' and 3' end modified with 2'-OMe and a 3' PS linkage
  misc_feature (1)..(20): n is a, c, g, or u

SEQ ID NO: 708 - RNA, 89 nt, Artificial Sequence; identical to SEQ ID NO: 608
  Synthetic
  misc_feature: 3 consecutive nucleotides at 5' and 3' end modified with 2'-OMe and a 3' PS linkage
  misc_feature (1)..(20): n is a, c, g, or u

SEQ ID NO: 709 - RNA, 89 nt, Artificial Sequence; identical to SEQ ID NO: 609
  Synthetic
  misc_feature: 3 consecutive nucleotides at 5' and 3' end modified with 2'-OMe and a 3' PS linkage
  misc_feature (1)..(20): n is a, c, g, or u

SEQ ID NO: 710 - RNA, 89 nt, Artificial Sequence; identical to SEQ ID NO: 610
  Synthetic
  misc_feature: 3 consecutive nucleotides at 5' and 3' end modified with 2'-OMe and a 3' PS linkage
  misc_feature (1)..(20): n is a, c, g, or u

SEQ ID NO: 711 - RNA, 88 nt, Artificial Sequence; identical to SEQ ID NO: 611
  Synthetic
  misc_feature: 3 consecutive nucleotides at 5' and 3' end modified with 2'-OMe and a 3' PS linkage
  misc_feature (1)..(20): n is a, c, g, or u

SEQ ID NO: 712 - RNA, 88 nt, Artificial Sequence; identical to SEQ ID NO: 612
  Synthetic
  misc_feature: 3 consecutive nucleotides at 5' and 3' end modified with 2'-OMe and a 3' PS linkage
  misc_feature (1)..(20): n is a, c, g, or u

SEQ ID NO: 713 - RNA, 86 nt, Artificial Sequence; identical to SEQ ID NO: 613
  Synthetic
  misc_feature: 3 consecutive nucleotides at 5' and 3' end modified with 2'-OMe and a 3' PS linkage
  misc_feature (1)..(20): n is a, c, g, or u

SEQ ID NO: 714 - RNA, 86 nt, Artificial Sequence; identical to SEQ ID NO: 614
  Synthetic
  misc_feature: 3 consecutive nucleotides at 5' and 3' end modified with 2'-OMe and a 3' PS linkage
  misc_feature (1)..(20): n is a, c, g, or u

SEQ ID NO: 715 - RNA, 84 nt, Artificial Sequence; identical to SEQ ID NO: 615
  Synthetic
  misc_feature: 3 consecutive nucleotides at 5' and 3' end modified with 2'-OMe and a 3' PS linkage
  misc_feature (1)..(20): n is a, c, g, or u

SEQ ID NO: 716 - RNA, 87 nt, Artificial Sequence; identical to SEQ ID NO: 616
  Synthetic
  misc_feature: 3 consecutive nucleotides at 5' and 3' end modified with 2'-OMe and a 3' PS linkage
  misc_feature (1)..(20): n is a, c, g, or u

SEQ ID NO: 717 - RNA, 87 nt, Artificial Sequence; identical to SEQ ID NO: 617
  Synthetic
  misc_feature: 3 consecutive nucleotides at 5' and 3' end modified with 2'-OMe and a 3' PS linkage
  misc_feature (1)..(20): n is a, c, g, or u

SEQ ID NO: 718 - RNA, 87 nt, Artificial Sequence; identical to SEQ ID NO: 618
  Synthetic
  misc_feature: 3 consecutive nucleotides at 5' and 3' end modified with 2'-OMe and a 3' PS linkage
  misc_feature (1)..(20): n is a, c, g, or u

SEQ ID NO: 719 - RNA, 87 nt, Artificial Sequence; identical to SEQ ID NO: 619
  Synthetic
  misc_feature: 3 consecutive nucleotides at 5' and 3' end modified with 2'-OMe and a 3' PS linkage
  misc_feature (1)..(20): n is a, c, g, or u

SEQ ID NO: 720 - RNA, 86 nt, Artificial Sequence; identical to SEQ ID NO: 620
  Synthetic
  misc_feature: 3 consecutive nucleotides at 5' and 3' end modified with 2'-OMe and a 3' PS linkage
  misc_feature (1)..(20): n is a, c, g, or u

SEQ ID NO: 721 - RNA, 86 nt, Artificial Sequence; identical to SEQ ID NO: 621
  Synthetic
  misc_feature: 3 consecutive nucleotides at 5' and 3' end modified with 2'-OMe and a 3' PS linkage
  misc_feature (1)..(20): n is a, c, g, or u

SEQ ID NO: 722 - RNA, 86 nt, Artificial Sequence; identical to SEQ ID NO: 622
  Synthetic
  misc_feature: 3 consecutive nucleotides at 5' and 3' end modified with 2'-OMe and a 3' PS linkage
  misc_feature (1)..(20): n is a, c, g, or u

SEQ ID NO: 723 - RNA, 84 nt, Artificial Sequence; identical to SEQ ID NO: 623
  Synthetic
  misc_feature: 3 consecutive nucleotides at 5' and 3' end modified with 2'-OMe and a 3' PS linkage
  misc_feature (1)..(20): n is a, c, g, or u

SEQ ID NO: 724 - RNA, 83 nt, Artificial Sequence; identical to SEQ ID NO: 624
  Synthetic
  misc_feature: 3 consecutive nucleotides at 5' and 3' end modified with 2'-OMe and a 3' PS linkage
  misc_feature (1)..(20): n is a, c, g, or u

SEQ ID NO: 725 - RNA, 83 nt, Artificial Sequence; identical to SEQ ID NO: 625
  Synthetic
  misc_feature: 3 consecutive nucleotides at 5' and 3' end modified with 2'-OMe and a 3' PS linkage
  misc_feature (1)..(20): n is a, c, g, or u

SEQ ID NO: 726 - RNA, 82 nt, Artificial Sequence; identical to SEQ ID NO: 626
  Synthetic
  misc_feature: 3 consecutive nucleotides at 5' and 3' end modified with 2'-OMe and a 3' PS linkage
  misc_feature (1)..(20): n is a, c, g, or u

SEQ ID NO: 727 - RNA, 82 nt, Artificial Sequence; identical to SEQ ID NO: 627
  Synthetic
  misc_feature: 3 consecutive nucleotides at 5' and 3' end modified with 2'-OMe and a 3' PS linkage
  misc_feature (1)..(20): n is a, c, g, or u

SEQ ID NO: 728 - RNA, 82 nt, Artificial Sequence; identical to SEQ ID NO: 628
  Synthetic
  misc_feature: 3 consecutive nucleotides at 5' and 3' end modified with 2'-OMe and a 3' PS linkage
  misc_feature (1)..(20): n is a, c, g, or u

SEQ ID NO: 729 - RNA, 80 nt, Artificial Sequence; identical to SEQ ID NO: 629
  Synthetic
  misc_feature: 3 consecutive nucleotides at 5' and 3' end modified with 2'-OMe and a 3' PS linkage
  misc_feature (1)..(20): n is a, c, g, or u

SEQ ID NO: 730 - RNA, 80 nt, Artificial Sequence; identical to SEQ ID NO: 630
  Synthetic
  misc_feature: 3 consecutive nucleotides at 5' and 3' end modified with 2'-OMe and a 3' PS linkage
  misc_feature (1)..(20): n is a, c, g, or u

SEQ ID NO: 731 - RNA, 79 nt, Artificial Sequence; identical to SEQ ID NO: 631
  Synthetic
  misc_feature: 3 consecutive nucleotides at 5' and 3' end modified with 2'-OMe and a 3' PS linkage
  misc_feature (1)..(20): n is a, c, g, or u

SEQ ID NO: 732 - RNA, 78 nt, Artificial Sequence; identical to SEQ ID NO: 632
  Synthetic
  misc_feature: 3 consecutive nucleotides at 5' and 3' end modified with 2'-OMe and a 3' PS linkage
  misc_feature (1)..(20): n is a, c, g, or u

SEQ ID NO: 733 - RNA, 78 nt, Artificial Sequence; identical to SEQ ID NO: 633
  Synthetic
  misc_feature: 3 consecutive nucleotides at 5' and 3' end modified with 2'-OMe and a 3' PS linkage
  misc_feature (1)..(20): n is a, c, g, or u

SEQ ID NO: 734 - RNA, 77 nt, Artificial Sequence; identical to SEQ ID NO: 634
  Synthetic
  misc_feature: 3 consecutive nucleotides at 5' and 3' end modified with 2'-OMe and a 3' PS linkage
  misc_feature (1)..(20): n is a, c, g, or u

SEQ ID NO: 735 - RNA, 87 nt, Artificial Sequence; identical to SEQ ID NO: 635
  Synthetic
  misc_feature: 3 consecutive nucleotides at 5' and 3' end modified with 2'-OMe and a 3' PS linkage
  misc_feature (1)..(20): n is a, c, g, or u

SEQ ID NO: 736 - RNA, 86 nt, Artificial Sequence; identical to SEQ ID NO: 636
  Synthetic
  misc_feature: 3 consecutive nucleotides at 5' and 3' end modified with 2'-OMe and a 3' PS linkage
  misc_feature (1)..(20): n is a, c, g, or u

SEQ ID NO: 737 - RNA, 85 nt, Artificial Sequence; identical to SEQ ID NO: 637
  Synthetic
  misc_feature: 3 consecutive nucleotides at 5' and 3' end modified with 2'-OMe and a 3' PS linkage
  misc_feature (1)..(20): n is a, c, g, or u

SEQ ID NO: 738 - RNA, 84 nt, Artificial Sequence; identical to SEQ ID NO: 638
  Synthetic
  misc_feature: 3 consecutive nucleotides at 5' and 3' end modified with 2'-OMe and a 3' PS linkage
  misc_feature (1)..(20): n is a, c, g, or u

SEQ ID NO: 739 - RNA, 83 nt, Artificial Sequence; identical to SEQ ID NO: 639
  Synthetic
  misc_feature: 3 consecutive nucleotides at 5' and 3' end modified with 2'-OMe and a 3' PS linkage
  misc_feature (1)..(20): n is a, c, g, or u

SEQ ID NO: 740 - RNA, 82 nt, Artificial Sequence; identical to SEQ ID NO: 640
  Synthetic
  misc_feature: 3 consecutive nucleotides at 5' and 3' end modified with 2'-OMe and a 3' PS linkage
  misc_feature (1)..(20): n is a, c, g, or u

SEQ ID NO: 741 - RNA, 82 nt, Artificial Sequence; identical to SEQ ID NO: 641
  Synthetic
  misc_feature: 3 consecutive nucleotides at 5' and 3' end modified with 2'-OMe and a 3' PS linkage
  misc_feature (1)..(20): n is a, c, g, or u

SEQ ID NO: 742 - RNA, 80 nt, Artificial Sequence; identical to SEQ ID NO: 642
  Synthetic
  misc_feature: 3 consecutive nucleotides at 5' and 3' end modified with 2'-OMe and a 3' PS linkage
  misc_feature (1)..(20): n is a, c, g, or u

SEQ ID NO: 743 - RNA, 80 nt, Artificial Sequence; identical to SEQ ID NO: 643
  Synthetic
  misc_feature: 3 consecutive nucleotides at 5' and 3' end modified with 2'-OMe and a 3' PS linkage
  misc_feature (1)..(20): n is a, c, g, or u

SEQ ID NO: 744 - RNA, 80 nt, Artificial Sequence; identical to SEQ ID NO: 644
  Synthetic
  misc_feature: 3 consecutive nucleotides at 5' and 3' end modified with 2'-OMe and a 3' PS linkage
  misc_feature (1)..(20): n is a, c, g, or u

SEQ ID NO: 745 - RNA, 78 nt, Artificial Sequence; identical to SEQ ID NO: 645
  Synthetic
  misc_feature: 3 consecutive nucleotides at 5' and 3' end modified with 2'-OMe and a 3' PS linkage
  misc_feature (1)..(20): n is a, c, g, or u

SEQ ID NO: 746 - RNA, 80 nt, Artificial Sequence; identical to SEQ ID NO: 646
  Synthetic
  misc_feature: 3 consecutive nucleotides at 5' and 3' end modified with 2'-OMe and a 3' PS linkage
  misc_feature (1)..(20): n is a, c, g, or u

SEQ ID NO: 747 - RNA, 76 nt, Artificial Sequence; identical to SEQ ID NO: 647
  Synthetic
  misc_feature: 3 consecutive nucleotides at 5' and 3' end modified with 2'-OMe and a 3' PS linkage
  misc_feature (1)..(20): n is a, c, g, or u

SEQ ID NO: 748 - RNA, 86 nt, Artificial Sequence; identical to SEQ ID NO: 648
  Synthetic
  misc_feature: 3 consecutive nucleotides at 5' and 3' end modified with 2'-OMe and a 3' PS linkage
  misc_feature (1)..(20): n is a, c, g, or u

SEQ ID NO: 749 - RNA, 87 nt, Artificial Sequence; identical to SEQ ID NO: 649
  Synthetic
  misc_feature: 3 consecutive nucleotides at 5' and 3' end modified with 2'-OMe and a 3' PS linkage
  misc_feature (1)..(20): n is a, c, g, or u

SEQ ID NO: 750 - RNA, 87 nt, Artificial Sequence; identical to SEQ ID NO: 650
  Synthetic
  misc_feature: 3 consecutive nucleotides at 5' and 3' end modified with 2'-OMe and a 3' PS linkage
  misc_feature (1)..(20): n is a, c, g, or u

SEQ ID NO: 751 - RNA, 86 nt, Artificial Sequence; identical to SEQ ID NO: 651
  Synthetic
  misc_feature: 3 consecutive nucleotides at 5' and 3' end modified with 2'-OMe and a 3' PS linkage
  misc_feature (1)..(20): n is a, c, g, or u

SEQ ID NO: 752 - RNA, 86 nt, Artificial Sequence; identical to SEQ ID NO: 652
  Synthetic
  misc_feature: 3 consecutive nucleotides at 5' and 3' end modified with 2'-OMe and a 3' PS linkage
  misc_feature (1)..(20): n is a, c, g, or u

SEQ ID NO: 753 - RNA, 85 nt, Artificial Sequence; identical to SEQ ID NO: 653
  Synthetic
  misc_feature: 3 consecutive nucleotides at 5' and 3' end modified with 2'-OMe and a 3' PS linkage
  misc_feature (1)..(20): n is a, c, g, or u

SEQ ID NO: 754 - RNA, 85 nt, Artificial Sequence; identical to SEQ ID NO: 654
  Synthetic
  misc_feature: 3 consecutive nucleotides at 5' and 3' end modified with 2'-OMe and a 3' PS linkage
  misc_feature (1)..(20): n is a, c, g, or u

SEQ ID NO: 755 - RNA, 88 nt, Artificial Sequence; identical to SEQ ID NO: 655
  Synthetic
  misc_feature: 3 consecutive nucleotides at 5' and 3' end modified with 2'-OMe and a 3' PS linkage
  misc_feature (1)..(20): n is a, c, g, or u

SEQ ID NO: 756 - RNA, 88 nt, Artificial Sequence; identical to SEQ ID NO: 656
  Synthetic
  misc_feature: 3 consecutive nucleotides at 5' and 3' end modified with 2'-OMe and a 3' PS linkage
  misc_feature (1)..(20): n is a, c, g, or u

SEQ ID NO: 757 - RNA, 88 nt, Artificial Sequence; identical to SEQ ID NO: 657
  Synthetic
  misc_feature: 3 consecutive nucleotides at 5' and 3' end modified with 2'-OMe and a 3' PS linkage
  misc_feature (1)..(20): n is a, c, g, or u

SEQ ID NO: 758 - RNA, 88 nt, Artificial Sequence; identical to SEQ ID NO: 658
  Synthetic
  misc_feature: 3 consecutive nucleotides at 5' and 3' end modified with 2'-OMe and a 3' PS linkage
  misc_feature (1)..(20): n is a, c, g, or u

SEQ ID NO: 759 - RNA, 88 nt, Artificial Sequence; identical to SEQ ID NO: 659
  Synthetic
  misc_feature: 3 consecutive nucleotides at 5' and 3' end modified with 2'-OMe and a 3' PS linkage
  misc_feature (1)..(20): n is a, c, g, or u

SEQ ID NO: 760 - RNA, 88 nt, Artificial Sequence; identical to SEQ ID NO: 660
  Synthetic
  misc_feature: 3 consecutive nucleotides at 5' and 3' end modified with 2'-OMe and a 3' PS linkage
  misc_feature (1)..(20): n is a, c, g, or u

SEQ ID NO: 761 - RNA, 88 nt, Artificial Sequence; identical to SEQ ID NO: 661
  Synthetic
  misc_feature: 3 consecutive nucleotides at 5' and 3' end modified with 2'-OMe and a 3' PS linkage
  misc_feature (1)..(20): n is a, c, g, or u

SEQ ID NO: 762 - RNA, 88 nt, Artificial Sequence; identical to SEQ ID NO: 662
  Synthetic
  misc_feature: 3 consecutive nucleotides at 5' and 3' end modified with 2'-OMe and a 3' PS linkage
  misc_feature (1)..(20): n is a, c, g, or u

SEQ ID NO: 763 - RNA, 88 nt, Artificial Sequence; identical to SEQ ID NO: 663
  Synthetic
  misc_feature: 3 consecutive nucleotides at 5' and 3' end modified with 2'-OMe and a 3' PS linkage
  misc_feature (1)..(20): n is a, c, g, or u

SEQ ID NO: 764 - RNA, 88 nt, Artificial Sequence; identical to SEQ ID NO: 664
  Synthetic
  misc_feature: 3 consecutive nucleotides at 5' and 3' end modified with 2'-OMe and a 3' PS linkage
  misc_feature (1)..(20): n is a, c, g, or u

SEQ ID NO: 765 - RNA, 88 nt, Artificial Sequence; identical to SEQ ID NO: 665
  Synthetic
  misc_feature: 3 consecutive nucleotides at 5' and 3' end modified with 2'-OMe and a 3' PS linkage
  misc_feature (1)..(20): n is a, c, g, or u

SEQ ID NO: 766 - RNA, 88 nt, Artificial Sequence; identical to SEQ ID NO: 666
  Synthetic
  misc_feature: 3 consecutive nucleotides at 5' and 3' end modified with 2'-OMe and a 3' PS linkage
  misc_feature (1)..(20): n is a, c, g, or u

SEQ ID NO: 767 - RNA, 88 nt, Artificial Sequence; identical to SEQ ID NO: 667
  Synthetic
  misc_feature: 3 consecutive nucleotides at 5' and 3' end modified with 2'-OMe and a 3' PS linkage
  misc_feature (1)..(20): n is a, c, g, or u

SEQ ID NO: 768 - RNA, 88 nt, Artificial Sequence; identical to SEQ ID NO: 668
  Synthetic
  misc_feature: 3 consecutive nucleotides at 5' and 3' end modified with 2'-OMe and a 3' PS linkage
  misc_feature (1)..(20): n is a, c, g, or u

SEQ ID NO: 769 - RNA, 88 nt, Artificial Sequence; identical to SEQ ID NO: 669
  Synthetic
  misc_feature: 3 consecutive nucleotides at 5' and 3' end modified with 2'-OMe and a 3' PS linkage
  misc_feature (1)..(20): n is a, c, g, or u

SEQ ID NO: 770 - RNA, 88 nt, Artificial Sequence; identical to SEQ ID NO: 670
  Synthetic
  misc_feature: 3 consecutive nucleotides at 5' and 3' end modified with 2'-OMe and a 3' PS linkage
  misc_feature (1)..(20): n is a, c, g, or u

SEQ ID NO: 771 - RNA, 88 nt, Artificial Sequence; identical to SEQ ID NO: 671
  Synthetic
  misc_feature: 3 consecutive nucleotides at 5' and 3' end modified with 2'-OMe and a 3' PS linkage
  misc_feature (1)..(20): n is a, c, g, or u

SEQ ID NO: 772 - RNA, 88 nt, Artificial Sequence; identical to SEQ ID NO: 672
  Synthetic
  misc_feature: 3 consecutive nucleotides at 5' and 3' end modified with 2'-OMe and a 3' PS linkage
  misc_feature (1)..(20): n is a, c, g, or u

SEQ ID NO: 773 - RNA, 98 nt, Artificial Sequence; identical to SEQ ID NO: 73
  Synthetic
  misc_feature: 3 consecutive nucleotides at 5' and 3' end modified with 2'-OMe and a 3' PS linkage

SEQ ID NO: 774 - RNA, 96 nt, Artificial Sequence; identical to SEQ ID NO: 74
  Synthetic
  misc_feature: 3 consecutive nucleotides at 5' and 3' end modified with 2'-OMe and a 3' PS linkage

SEQ ID NO: 775 - RNA, 94 nt, Artificial Sequence; identical to SEQ ID NO: 75
  Synthetic
  misc_feature: 3 consecutive nucleotides at 5' and 3' end modified with 2'-OMe and a 3' PS linkage

SEQ ID NO: 776 - RNA, 82 nt, Artificial Sequence; identical to SEQ ID NO: 76
  Synthetic
  misc_feature: 3 consecutive nucleotides at 5' and 3' end modified with 2'-OMe and a 3' PS linkage

SEQ ID NO: 777 - RNA, 84 nt, Artificial Sequence; identical to SEQ ID NO: 77
  Synthetic
  misc_feature: 3 consecutive nucleotides at 5' and 3' end modified with 2'-OMe and a 3' PS linkage

SEQ ID NO: 778 - RNA, 86 nt, Artificial Sequence; identical to SEQ ID NO: 78
  Synthetic
  misc_feature: 3 consecutive nucleotides at 5' and 3' end modified with 2'-OMe and a 3' PS linkage

SEQ ID NO: 779 - RNA, 92 nt, Artificial Sequence; identical to SEQ ID NO: 79
  Synthetic
  misc_feature: 3 consecutive nucleotides at 5' and 3' end modified with 2'-OMe and a 3' PS linkage

SEQ ID NO: 780 - RNA, 88 nt, Artificial Sequence; identical to SEQ ID NO: 673
  Synthetic
  misc_feature: 3 consecutive nucleotides at 5' and 3' end modified with 2'-OMe and a 3' PS linkage
  misc_feature (1)..(20): n is a, c, g, or u

SEQ ID NO: 781 - RNA, 90 nt, Artificial Sequence; identical to SEQ ID NO: 607
  Synthetic
  misc_feature: 3 consecutive nucleotides at 5' and 3' end modified with 2'-OMe and a 3' PS linkage; plus some nucleotides mid sequence modified with 2'-OMe
  misc_feature (1)..(20): n is a, c, g, or u

SEQ ID NO: 782 - RNA, 89 nt, Artificial Sequence; identical to SEQ ID NO: 608
  Synthetic
  misc_feature: 3 consecutive nucleotides at 5' and 3' end modified with 2'-OMe and a 3' PS linkage; plus some nucleotides mid sequence modified with 2'-OMe
  misc_feature (1)..(20): n is a, c, g, or u

SEQ ID NO: 783 - RNA, 88 nt, Artificial Sequence; identical to SEQ ID NO: 611
  Synthetic
  misc_feature: 3 consecutive nucleotides at 5' and 3' end modified with 2'-OMe and a 3' PS linkage; plus some nucleotides mid sequence modified with 2'-OMe
  misc_feature (1)..(20): n is a, c, g, or u

SEQ ID NO: 784 - RNA, 88 nt, Artificial Sequence; identical to SEQ ID NO: 612
  Synthetic
  misc_feature: 3 consecutive nucleotides at 5' and 3' end modified with 2'-OMe and a 3' PS linkage; plus some nucleotides mid sequence modified with 2'-OMe
  misc_feature (1)..(20): n is a, c, g, or u

SEQ ID NO: 785 - RNA, 87 nt, Artificial Sequence; identical to SEQ ID NO: 685
  Synthetic
  misc_feature: 3 consecutive nucleotides at 5' and 3' end modified with 2'-OMe and a 3' PS linkage
  misc_feature (1)..(20): n is a, c, g, or u

SEQ ID NO: 786 - RNA, 86 nt, Artificial Sequence; identical to SEQ ID NO: 686
  Synthetic
  misc_feature: 3 consecutive nucleotides at 5' and 3' end modified with 2'-OMe and a 3' PS linkage
  misc_feature (1)..(20): n is a, c, g, or u

SEQ ID NO: 787 - RNA, 84 nt, Artificial Sequence; identical to SEQ ID NO: 687
  Synthetic
  misc_feature: 3 consecutive nucleotides at 5' and 3' end modified with 2'-OMe and a 3' PS linkage
  misc_feature (1)..(20): n is a, c, g, or u

SEQ ID NO: 788 - RNA, 83 nt, Artificial Sequence; identical to SEQ ID NO: 688
  Synthetic
  misc_feature: 3 consecutive nucleotides at 5' and 3' end modified with 2'-OMe and a 3' PS linkage
  misc_feature (1)..(20): n is a, c, g, or u

SEQ ID NO: 789 - RNA, 84 nt, Artificial Sequence; identical to SEQ ID NO: 623
  Synthetic
  misc_feature: 3 consecutive nucleotides at 5' and 3' end modified with 2'-OMe and a 3' PS linkage; plus some nucleotides mid sequence modified with 2'-OMe
  misc_feature (1)..(20): n is a, c, g, or u

SEQ ID NO: 790 - RNA, 86 nt, Artificial Sequence; identical to SEQ ID NO: 690
  Synthetic
  misc_feature: 3 consecutive nucleotides at 5' and 3' end modified with 2'-OMe and a 3' PS linkage; plus some nucleotides mid sequence modified with 2'-OMe
  misc_feature (1)..(20): n is a, c, g, or u

SEQ ID NO: 791 - RNA, 93 nt, Artificial Sequence
  Synthetic
  misc_feature: 3 consecutive nucleotides at 5' and 3' end modified with 2'-OMe and a 3' PS linkage; plus some nucleotides mid sequence modified with 2'-OMe
  misc_feature (1)..(23): n is a, c, g, or u
nnnnnnnnnnnnnnnnnnnnnnnguuuuagagcuagaaauagcaaguuaaaauaaggcuaguccguuaucacgaaagggcaccgagucggugc

SEQ ID NO: 792 - RNA, 91 nt, Artificial Sequence
  Synthetic
  misc_feature: 3 consecutive nucleotides at 5' and 3' end modified with 2'-OMe and a 3' PS linkage; plus some nucleotides mid sequence modified with 2'-OMe
  misc_feature (1)..(23): n is a, c, g, or u
nnnnnnnnnnnnnnnnnnnnnnnguuuuagagcuagaaauagcaaguuaaaauaaggcuaguccguuaucaaaauggcaccgagucggugc

SEQ ID NO: 793 - RNA, 93 nt, Artificial Sequence; identical to SEQ ID NO: 791
  Synthetic
  misc_feature: 3 consecutive nucleotides at 5' and 3' end modified with 2'-OMe and a 3' PS linkage; plus some nucleotides mid sequence modified with 2'-OMe
  misc_feature (1)..(23): n is a, c, g, or u

SEQ ID NO: 794 - RNA, 91 nt, Artificial Sequence; identical to SEQ ID NO: 792
  Synthetic
  misc_feature: 3 consecutive nucleotides at 5' and 3' end modified with 2'-OMe and a 3' PS linkage; plus some nucleotides mid sequence modified with 2'-OMe
  misc_feature (1)..(23): n is a, c, g, or u

SEQ ID NO: 795 - RNA, 90 nt, Artificial Sequence; identical to SEQ ID NO: 7
  Synthetic
  misc_feature: 3 consecutive nucleotides at 5' and 3' end modified with 2'-OMe and a 3' PS linkage; plus some nucleotides mid sequence modified with 2'-OMe

SEQ ID NO: 796 - RNA, 88 nt, Artificial Sequence; identical to SEQ ID NO: 12
  Synthetic
  misc_feature: 3 consecutive nucleotides at 5' and 3' end modified with 2'-OMe and a 3' PS linkage; plus some nucleotides mid sequence modified with 2'-OMe

SEQ ID NO: 797 - RNA, 90 nt, Artificial Sequence; identical to SEQ ID NO: 7
  Synthetic
  misc_feature: 3 consecutive nucleotides at 5' and 3' end modified with 2'-OMe and a 3' PS linkage; plus some nucleotides mid sequence modified with 2'-OMe

SEQ ID NO: 798 - RNA, 88 nt, Artificial Sequence; identical to SEQ ID NO: 12
  Synthetic
  misc_feature: 3 consecutive nucleotides at 5' and 3' end modified with 2'-OMe and a 3' PS linkage; plus some nucleotides mid sequence modified with 2'-OMe

SEQ ID NO: 799-800 - skipped (2 entries)

SEQ ID NO: 801 - RNA, 100 nt, Artificial Sequence
  Synthetic
gccgagucuggagagcugcaguuuuagagcuagaaauagcaaguuaaaauaaggcuaguccguuaucaacuugaaaaaguggcaccgagucggugcuuuu

SEQ ID NO: 802 - RNA, 100 nt, Artificial Sequence
  Synthetic
ucacaggaccacucaccccaguuuuagagcuagaaauagcaaguuaaaauaaggcuaguccguuaucaacuugaaaaaguggcaccgagucggugcuuuu

SEQ ID NO: 803 - RNA, 100 nt, Artificial Sequence
  Synthetic
ugcucuguaagcuuacccagguuuuagagcuagaaauagcaaguuaaaauaaggcuaguccguuaucaacuugaaaaaguggcaccgagucggugcuuuu

SEQ ID NO: 804 - RNA, 100 nt, Artificial Sequence
  Synthetic
ggacaccaaaucguacuggaguuuuagagcuagaaauagcaaguuaaaauaaggcuaguccguuaucaacuugaaaaaguggcaccgagucggugcuuuu

SEQ ID NO: 805 - RNA, 100 nt, Artificial Sequence
  Synthetic
acgcaaauaucaguccagcgguuuuagagcuagaaauagcaaguuaaaauaaggcuaguccguuaucaacuugaaaaaguggcaccgagucggugcuuuu

SEQ ID NO: 806 - RNA, 100 nt, Artificial Sequence
  Synthetic
aaaguccuggaugcuguccgguuuuagagcuagaaauagcaaguuaaaauaaggcuaguccguuaucaacuugaaaaaguggcaccgagucggugcuuuu

SEQ ID NO: 807 - RNA, 100 nt, Artificial Sequence
  Synthetic
aacuggacaccaaaucguacguuuuagagcuagaaauagcaaguuaaaauaaggcuaguccguuaucaacuugaaaaaguggcaccgagucggugcuuuu

SEQ ID NO: 808 - RNA, 88 nt, Artificial Sequence
  Synthetic
acgcaaauaucaguccagcgguuuuagagcuagaaauagcaaguuaaaauaaggcuaguccguuaucaacuuggcaccgagucggugc

SEQ ID NO: 809 - RNA, 90 nt, Artificial Sequence
  Synthetic
acgcaaauaucaguccagcgguuuuagagcuagaaauagcaaguuaaaauaaggcuaguccguuaucacgaaagggcaccgagucggugc

SEQ ID NO: 810 - RNA, 88 nt, Artificial Sequence
  Synthetic
acgcaaauaucaguccagcgguuuuagagcuagaaauagcaaguuaaaauaaggcuaguccguuaucaaaauggcaccgagucggugc

SEQ ID NO: 811 - RNA, 90 nt, Artificial Sequence; identical to SEQ ID NO: 809
  Synthetic

SEQ ID NO: 812 - RNA, 88 nt, Artificial Sequence; identical to SEQ ID NO: 810
  Synthetic

SEQ ID NO: 813 - RNA, 90 nt, Artificial Sequence
  Synthetic
gccgagucuggagagcugcaguuuuagagcuagaaauagcaaguuaaaauaaggcuaguccguuaucacgaaagggcaccgagucggugc

SEQ ID NO: 814 - RNA, 90 nt, Artificial Sequence
  Synthetic
ugcucuguaagcuuacccagguuuuagagcuagaaauagcaaguuaaaauaaggcuaguccguuaucacgaaagggcaccgagucggugc

SEQ ID NO: 815 - RNA, 88 nt, Artificial Sequence
  Synthetic
gccgagucuggagagcugcaguuuuagagcuagaaauagcaaguuaaaauaaggcuaguccguuaucaacuuggcaccgagucggugc

SEQ ID NO: 816 - RNA, 88 nt, Artificial Sequence
  Synthetic
ugcucuguaagcuuacccagguuuuagagcuagaaauagcaaguuaaaauaaggcuaguccguuaucaacuuggcaccgagucggugc

SEQ ID NO: 817 - RNA, 90 nt, Artificial Sequence; identical to SEQ ID NO: 7
  Synthetic

SEQ ID NO: 818 - RNA, 90 nt, Artificial Sequence; identical to SEQ ID NO: 7
  Synthetic

SEQ ID NO: 819 - RNA, 100 nt, Artificial Sequence; identical to SEQ ID NO: 91
  Synthetic

SEQ ID NO: 820 - RNA, 88 nt, Artificial Sequence; identical to SEQ ID NO: 80
  Synthetic

SEQ ID NO: 821 - RNA, 90 nt, Artificial Sequence; identical to SEQ ID NO: 7
  Synthetic

SEQ ID NO: 822 - RNA, 90 nt, Artificial Sequence; identical to SEQ ID NO: 7
  Synthetic

SEQ ID NO: 823 - RNA, 90 nt, Artificial Sequence; identical to SEQ ID NO: 7
  Synthetic

SEQ ID NO: 824 - RNA, 90 nt, Artificial Sequence; identical to SEQ ID NO: 7
  Synthetic

SEQ ID NO: 825 - RNA, 90 nt, Artificial Sequence; identical to SEQ ID NO: 7
  Synthetic

SEQ ID NO: 826 - RNA, 90 nt, Artificial Sequence; identical to SEQ ID NO: 7
  Synthetic

SEQ ID NO: 827 - RNA, 90 nt, Artificial Sequence; identical to SEQ ID NO: 7
  Synthetic

SEQ ID NO: 828 - RNA, 90 nt, Artificial Sequence; identical to SEQ ID NO: 7
  Synthetic

SEQ ID NO: 829 - RNA, 90 nt, Artificial Sequence; identical to SEQ ID NO: 7
  Synthetic

SEQ ID NO: 830 - RNA, 90 nt, Artificial Sequence; identical to SEQ ID NO: 7
  Synthetic

SEQ ID NO: 831 - RNA, 90 nt, Artificial Sequence; identical to SEQ ID NO: 7
  Synthetic

SEQ ID NO: 832 - RNA, 90 nt, Artificial Sequence; identical to SEQ ID NO: 7
  Synthetic

SEQ ID NO: 833 - RNA, 90 nt, Artificial Sequence; identical to SEQ ID NO: 7
  Synthetic

SEQ ID NO: 834 - RNA, 90 nt, Artificial Sequence; identical to SEQ ID NO: 7
  Synthetic

SEQ ID NO: 835 - RNA, 90 nt, Artificial Sequence; identical to SEQ ID NO: 7
  Synthetic

SEQ ID NO: 836 - RNA, 90 nt, Artificial Sequence; identical to SEQ ID NO: 7
  Synthetic

SEQ ID NO: 837 - RNA, 90 nt, Artificial Sequence; identical to SEQ ID NO: 7
  Synthetic

SEQ ID NO: 838 - RNA, 90 nt, Artificial Sequence; identical to SEQ ID NO: 7
  Synthetic

SEQ ID NO: 839 - RNA, 90 nt, Artificial Sequence; identical to SEQ ID NO: 7
  Synthetic

SEQ ID NO: 840 - RNA, 90 nt, Artificial Sequence; identical to SEQ ID NO: 7
  Synthetic

SEQ ID NO: 841 - RNA, 90 nt, Artificial Sequence; identical to SEQ ID NO: 7
  Synthetic

SEQ ID NO: 842 - RNA, 90 nt, Artificial Sequence; identical to SEQ ID NO: 7
  Synthetic

SEQ ID NO: 843 - RNA, 90 nt, Artificial Sequence; identical to SEQ ID NO: 7
  Synthetic

SEQ ID NO: 844 - RNA, 90 nt, Artificial Sequence; identical to SEQ ID NO: 7
  Synthetic

SEQ ID NO: 845 - RNA, 90 nt, Artificial Sequence; identical to SEQ ID NO: 7
  Synthetic

SEQ ID NO: 846 - RNA, 90 nt, Artificial Sequence; identical to SEQ ID NO: 7
  Synthetic

SEQ ID NO: 847 - RNA, 90 nt, Artificial Sequence; identical to SEQ ID NO: 7
  Synthetic

SEQ ID NO: 848 - RNA, 90 nt, Artificial Sequence; identical to SEQ ID NO: 7
  Synthetic

SEQ ID NO: 849 - RNA, 90 nt, Artificial Sequence; identical to SEQ ID NO: 7
  Synthetic

SEQ ID NO: 850 - RNA, 90 nt, Artificial Sequence; identical to SEQ ID NO: 7
  Synthetic

SEQ ID NO: 851 - RNA, 90 nt, Artificial Sequence; identical to SEQ ID NO: 7
  Synthetic

SEQ ID NO: 852 - RNA, 90 nt, Artificial Sequence
  Synthetic
acacaaauaccaguccagcgguuuucgagcuagaaauagcaagugaaaauaaggcuaguccguuaucacgaaagggcaccgagucggugc

SEQ ID NO: 853 - RNA, 90 nt, Artificial Sequence
  Synthetic
acacaaauaccaguccagcgguuuuagagcuagaaauagcaaguuaaaaugaggcuaguccguuaucacgaaagggcaccgagucggugc

SEQ ID NO: 854 - RNA, 90 nt, Artificial Sequence; identical to SEQ ID NO: 853
  Synthetic

SEQ ID NO: 855 - RNA, 90 nt, Artificial Sequence
  Synthetic
acacaaauaccaguccagcgguuuuagagcuagaaauagcaaguuaaaauaaggcuaguccgugaucacgaaagggcaccgagucggugc

SEQ ID NO: 856 - RNA, 90 nt, Artificial Sequence; identical to SEQ ID NO: 855
  Synthetic

SEQ ID NO: 857 - RNA, 90 nt, Artificial Sequence
  Synthetic
acacaaauaccaguccagcgguuuuagagcuagaaauagcaaguuaaaauaaggcuaguccguuaucccgaaagggcaccgagucggugc

SEQ ID NO: 858 - RNA, 90 nt, Artificial Sequence; identical to SEQ ID NO: 857
  Synthetic

SEQ ID NO: 859 - RNA, 90 nt, Artificial Sequence
  Synthetic
acacaaauaccaguccagcgguuuucgagcuagaaauagcaagugaaaaugaggcuaguccgugaucccgaaagggcaccgagucggugc

SEQ ID NO: 860 - RNA, 90 nt, Artificial Sequence; identical to SEQ ID NO: 859
  Synthetic

SEQ ID NO: 861 - RNA, 90 nt, Artificial Sequence; identical to SEQ ID NO: 7
  Synthetic

SEQ ID NO: 862 - RNA, 90 nt, Artificial Sequence; identical to SEQ ID NO: 7
  Synthetic

SEQ ID NO: 863 - RNA, 90 nt, Artificial Sequence; identical to SEQ ID NO: 7
  Synthetic

SEQ ID NO: 864 - RNA, 90 nt, Artificial Sequence; identical to SEQ ID NO: 7
  Synthetic

SEQ ID NO: 865 - RNA, 90 nt, Artificial Sequence; identical to SEQ ID NO: 7
  Synthetic

SEQ ID NO: 866 - RNA, 90 nt, Artificial Sequence; identical to SEQ ID NO: 7
  Synthetic

SEQ ID NO: 867 - RNA, 90 nt, Artificial Sequence; identical to SEQ ID NO: 7
  Synthetic

SEQ ID NO: 868 - RNA, 90 nt, Artificial Sequence; identical to SEQ ID NO: 7
  Synthetic

SEQ ID NO: 869 - RNA, 90 nt, Artificial Sequence; identical to SEQ ID NO: 855
  Synthetic

SEQ ID NO: 870 - RNA, 90 nt, Artificial Sequence; identical to SEQ ID NO: 7
  Synthetic

SEQ ID NO: 871 - RNA, 90 nt, Artificial Sequence; identical to SEQ ID NO: 7
  Synthetic

SEQ ID NO: 872 - RNA, 90 nt, Artificial Sequence; identical to SEQ ID NO: 7
  Synthetic

SEQ ID NO: 873 - RNA, 90 nt, Artificial Sequence; identical to SEQ ID NO: 7
  Synthetic

SEQ ID NO: 874 - RNA, 90 nt, Artificial Sequence; identical to SEQ ID NO: 7
  Synthetic

SEQ ID NO: 875 - RNA, 90 nt, Artificial Sequence; identical to SEQ ID NO: 7
  Synthetic

SEQ ID NO: 876-900 - skipped (25 entries)

SEQ ID NO: 901 - RNA, 100 nt, Artificial Sequence; identical to SEQ ID NO: 801
  Synthetic
  misc_feature: 3 consecutive nucleotides at 5' and 3' end modified with 2'-OMe and a 3' PS linkage; plus some nucleotides mid sequence modified with 2'-OMe

SEQ ID NO: 902 - RNA, 100 nt, Artificial Sequence; identical to SEQ ID NO: 802
  Synthetic
  misc_feature: 3 consecutive nucleotides at 5' and 3' end modified with 2'-OMe and a 3' PS linkage; plus some nucleotides mid sequence modified with 2'-OMe

SEQ ID NO: 903 - RNA, 100 nt, Artificial Sequence; identical to SEQ ID NO: 803
  Synthetic
  misc_feature: 3 consecutive nucleotides at 5' and 3' end modified with 2'-OMe and a 3' PS linkage; plus some nucleotides mid sequence modified with 2'-OMe

SEQ ID NO: 904 - RNA, 100 nt, Artificial Sequence; identical to SEQ ID NO: 804
  Synthetic
  misc_feature: 3 consecutive nucleotides at 5' and 3' end modified with 2'-OMe and a 3' PS linkage; plus some nucleotides mid sequence modified with 2'-OMe

SEQ ID NO: 905 - RNA, 100 nt, Artificial Sequence; identical to SEQ ID NO: 805
  Synthetic
  misc_feature: 3 consecutive nucleotides at 5' and 3' end modified with 2'-OMe and a 3' PS linkage; plus some nucleotides mid sequence modified with 2'-OMe

SEQ ID NO: 906 - RNA, 100 nt, Artificial Sequence; identical to SEQ ID NO: 806
  Synthetic
  misc_feature: 3 consecutive nucleotides at 5' and 3' end modified with 2'-OMe and a 3' PS linkage; plus some nucleotides mid sequence modified with 2'-OMe

SEQ ID NO: 907 - RNA, 100 nt, Artificial Sequence; identical to SEQ ID NO: 807
  Synthetic
  misc_feature: 3 consecutive nucleotides at 5' and 3' end modified with 2'-OMe and a 3' PS linkage; plus some nucleotides mid sequence modified with 2'-OMe

SEQ ID NO: 908 - RNA, 88 nt, Artificial Sequence; identical to SEQ ID NO: 808
  Synthetic
  misc_feature: 3 consecutive nucleotides at 5' and 3' end modified with 2'-OMe and a 3' PS linkage; plus some nucleotides mid sequence modified with 2'-OMe

SEQ ID NO: 909 - RNA, 90 nt, Artificial Sequence; identical to SEQ ID NO: 809
  Synthetic
  misc_feature: 3 consecutive nucleotides at 5' and 3' end modified with 2'-OMe and a 3' PS linkage; plus some nucleotides mid sequence modified with 2'-OMe

SEQ ID NO: 910 - RNA, 88 nt, Artificial Sequence; identical to SEQ ID NO: 810
  Synthetic
  misc_feature: 3 consecutive nucleotides at 5' and 3' end modified with 2'-OMe and a 3' PS linkage; plus some nucleotides mid sequence modified with 2'-OMe

SEQ ID NO: 911 - RNA, 90 nt, Artificial Sequence; identical to SEQ ID NO: 809
  Synthetic
  misc_feature: 3 consecutive nucleotides at 5' and 3' end modified with 2'-OMe and a 3' PS linkage; plus some nucleotides mid sequence modified with 2'-OMe

SEQ ID NO: 912 - RNA, 88 nt, Artificial Sequence; identical to SEQ ID NO: 810
  Synthetic
  misc_feature: 3 consecutive nucleotides at 5' and 3' end modified with 2'-OMe and a 3' PS linkage; plus some nucleotides mid sequence modified with 2'-OMe

SEQ ID NO: 913 - RNA, 90 nt, Artificial Sequence; identical to SEQ ID NO: 813
  Synthetic
  misc_feature: 3 consecutive nucleotides at 5' and 3' end modified with 2'-OMe and a 3' PS linkage; plus some nucleotides mid sequence modified with 2'-OMe

SEQ ID NO: 914 - RNA, 90 nt, Artificial Sequence; identical to SEQ ID NO: 814
  Synthetic
  misc_feature: 3 consecutive nucleotides at 5' and 3' end modified with 2'-OMe and a 3' PS linkage; plus some nucleotides mid sequence modified with 2'-OMe

SEQ ID NO: 915 - RNA, 88 nt, Artificial Sequence; identical to SEQ ID NO: 815
  Synthetic
  misc_feature: 3 consecutive nucleotides at 5' and 3' end modified with 2'-OMe and a 3' PS linkage; plus some nucleotides mid sequence modified with 2'-OMe

SEQ ID NO: 916 - RNA, 88 nt, Artificial Sequence; identical to SEQ ID NO: 816
  Synthetic
  misc_feature: 3 consecutive nucleotides at 5' and 3' end modified with 2'-OMe and a 3' PS linkage; plus some nucleotides mid sequence modified with 2'-OMe

SEQ ID NO: 917 - RNA, 90 nt, Artificial Sequence; identical to SEQ ID NO: 7
  Synthetic
  misc_feature: 3 consecutive nucleotides at 5' and 3' end modified with 2'-OMe and a 3' PS linkage; plus some nucleotides mid sequence modified with 2'-OMe

SEQ ID NO: 918 - RNA, 90 nt, Artificial Sequence; identical to SEQ ID NO: 7
  Synthetic
  misc_feature: 3 consecutive nucleotides at 5' and 3' end modified with 2'-OMe and a 3' PS linkage; plus some nucleotides mid sequence modified with 2'-OMe

SEQ ID NO: 919 - RNA, 100 nt, Artificial Sequence; identical to SEQ ID NO: 91
  Synthetic
  misc_feature: various 2'-OMe and a 3' PS linkages throughout sequence

SEQ ID NO: 920 - RNA, 88 nt, Artificial Sequence; identical to SEQ ID NO: 80
  Synthetic
  misc_feature: various 2'-OMe and a 3' PS linkages throughout sequence

SEQ ID NO: 921 - RNA, 90 nt, Artificial Sequence; identical to SEQ ID NO: 7
  Synthetic
  misc_feature: various 2'-OMe and a 3' PS linkages throughout sequence

SEQ ID NO: 922 - RNA, 90 nt, Artificial Sequence; identical to SEQ ID NO: 7
  Synthetic
  misc_feature: various 2'-OMe and a 3' PS linkages throughout sequence

SEQ ID NO: 923 - RNA, 90 nt, Artificial Sequence; identical to SEQ ID NO: 7
  Synthetic
  misc_feature: various 2'-OMe and a 3' PS linkages throughout sequence

SEQ ID NO: 924 - RNA, 90 nt, Artificial Sequence; identical to SEQ ID NO: 7
  Synthetic
  misc_feature: various 2'-OMe and a 3' PS linkages throughout sequence

SEQ ID NO: 925 - RNA, 90 nt, Artificial Sequence; identical to SEQ ID NO: 7
  Synthetic
  misc_feature: various 2'-OMe and a 3' PS linkages throughout sequence

SEQ ID NO: 926 - RNA, 90 nt, Artificial Sequence; identical to SEQ ID NO: 7
  Synthetic
  misc_feature: various 2'-OMe and a 3' PS linkages throughout sequence

SEQ ID NO: 927 - RNA, 90 nt, Artificial Sequence; identical to SEQ ID NO: 7
  Synthetic
  misc_feature: various 2'-OMe and a 3' PS linkages throughout sequence

SEQ ID NO: 928 - RNA, 90 nt, Artificial Sequence; identical to SEQ ID NO: 7
  Synthetic
  misc_feature: various 2'-OMe and a 3' PS linkages throughout sequence

SEQ ID NO: 929 - RNA, 90 nt, Artificial Sequence; identical to SEQ ID NO: 7
  Synthetic
  misc_feature: various 2'-OMe and a 3' PS linkages throughout sequence

SEQ ID NO: 930 - RNA, 90 nt, Artificial Sequence; identical to SEQ ID NO: 7
  Synthetic
  misc_feature: various 2'-OMe and a 3' PS linkages throughout sequence

SEQ ID NO: 931 - RNA, 90 nt, Artificial Sequence; identical to SEQ ID NO: 7
  Synthetic
  misc_feature: various 2'-OMe and a 3' PS linkages throughout sequence

SEQ ID NO: 932 - RNA, 90 nt, Artificial Sequence; identical to SEQ ID NO: 7
  Synthetic
  misc_feature: various 2'-OMe and a 3' PS linkages throughout sequence

SEQ ID NO: 933 - RNA, 90 nt, Artificial Sequence; identical to SEQ ID NO: 7
  Synthetic
  misc_feature: various 2'-OMe and a 3' PS linkages throughout sequence

SEQ ID NO: 934 - RNA, 90 nt, Artificial Sequence; identical to SEQ ID NO: 7
  Synthetic
  misc_feature: various 2'-OMe and a 3' PS linkages throughout sequence

SEQ ID NO: 935 - RNA, 90 nt, Artificial Sequence; identical to SEQ ID NO: 7
  Synthetic
  misc_feature: various 2'-OMe and a 3' PS linkages throughout sequence

SEQ ID NO: 936 - RNA, 90 nt, Artificial Sequence; identical to SEQ ID NO: 7
  Synthetic
  misc_feature: various 2'-OMe and a 3' PS linkages throughout sequence

SEQ ID NO: 937 - RNA, 90 nt, Artificial Sequence; identical to SEQ ID NO: 7
  Synthetic
  misc_feature: various 2'-OMe and a 3' PS linkages throughout sequence

SEQ ID NO: 938 - RNA, 90 nt, Artificial Sequence; identical to SEQ ID NO: 7
  Synthetic
  misc_feature: various 2'-OMe and a 3' PS linkages throughout sequence

SEQ ID NO: 939 - RNA, 90 nt, Artificial Sequence; identical to SEQ ID NO: 7
  Synthetic
  misc_feature: various 2'-OMe and a 3' PS linkages throughout sequence

SEQ ID NO: 940 - RNA, 90 nt, Artificial Sequence; identical to SEQ ID NO: 7
  Synthetic
  misc_feature: various 2'-OMe and a 3' PS linkages throughout sequence

SEQ ID NO: 941 - RNA, 90 nt, Artificial Sequence; identical to SEQ ID NO: 7
  Synthetic
  misc_feature: various 2'-OMe and a 3' PS linkages throughout sequence

SEQ ID NO: 942 - RNA, 90 nt, Artificial Sequence; identical to SEQ ID NO: 7
  Synthetic
  misc_feature: various 2'-OMe and a 3' PS linkages throughout sequence

SEQ ID NO: 943 - RNA, 90 nt, Artificial Sequence; identical to SEQ ID NO: 7
  Synthetic
  misc_feature: various 2'-OMe and a 3' PS linkages throughout sequence

SEQ ID NO: 944 - RNA, 90 nt, Artificial Sequence; identical to SEQ ID NO: 7
  Synthetic
  misc_feature: various 2'-OMe and a 3' PS linkages throughout sequence

SEQ ID NO: 945 - RNA, 90 nt, Artificial Sequence; identical to SEQ ID NO: 7
  Synthetic
  misc_feature: various 2'-OMe and a 3' PS linkages throughout sequence

SEQ ID NO: 946 - RNA, 90 nt, Artificial Sequence; identical to SEQ ID NO: 7
  Synthetic
  misc_feature: various 2'-OMe and a 3' PS linkages throughout sequence

SEQ ID NO: 947 - RNA, 90 nt, Artificial Sequence; identical to SEQ ID NO: 7
  Synthetic
  misc_feature: various 2'-OMe and a 3' PS linkages throughout sequence

SEQ ID NO: 948 - RNA, 90 nt, Artificial Sequence; identical to SEQ ID NO: 7
  Synthetic
  misc_feature: various 2'-OMe and a 3' PS linkages throughout sequence

SEQ ID NO: 949 - RNA, 90 nt, Artificial Sequence; identical to SEQ ID NO: 7
  Synthetic
  misc_feature: various 2'-OMe and a 3' PS linkages throughout sequence

SEQ ID NO: 950 - RNA, 90 nt, Artificial Sequence; identical to SEQ ID NO: 7
  Synthetic
  misc_feature: various 2'-OMe and a 3' PS linkages throughout sequence

SEQ ID NO: 951 - RNA, 90 nt, Artificial Sequence; identical to SEQ ID NO: 7
  Synthetic
  misc_feature: various 2'-OMe and a 3' PS linkages throughout sequence

SEQ ID NO: 952 - RNA, 90 nt, Artificial Sequence; identical to SEQ ID NO: 852
  Synthetic
  misc_feature: various 2'-OMe and a 3' PS linkages throughout sequence

SEQ ID NO: 953 - RNA, 90 nt, Artificial Sequence; identical to SEQ ID NO: 853
  Synthetic
  misc_feature: various 2'-OMe and a 3' PS linkages throughout sequence

SEQ ID NO: 954 - RNA, 90 nt, Artificial Sequence; identical to SEQ ID NO: 853
  Synthetic
  misc_feature: various 2'-OMe and a 3' PS linkages throughout sequence

SEQ ID NO: 955 - RNA, 90 nt, Artificial Sequence; identical to SEQ ID NO: 855
  Synthetic
  misc_feature: various 2'-OMe and a 3' PS linkages throughout sequence

SEQ ID NO: 956 - RNA, 90 nt, Artificial Sequence; identical to SEQ ID NO: 855
  Synthetic
  misc_feature: various 2'-OMe and a 3' PS linkages throughout sequence

SEQ ID NO: 957 - RNA, 90 nt, Artificial Sequence; identical to SEQ ID NO: 857
  Synthetic
  misc_feature: various 2'-OMe and a 3' PS linkages throughout sequence

SEQ ID NO: 958 - RNA, 90 nt, Artificial Sequence; identical to SEQ ID NO: 857
  Synthetic
  misc_feature: various 2'-OMe and a 3' PS linkages throughout sequence

SEQ ID NO: 959 - RNA, 90 nt, Artificial Sequence; identical to SEQ ID NO: 859
  Synthetic
  misc_feature: various 2'-OMe and a 3' PS linkages throughout sequence

SEQ ID NO: 960 - RNA, 90 nt, Artificial Sequence; identical to SEQ ID NO: 859
  Synthetic
  misc_feature: various 2'-OMe and a 3' PS linkages throughout sequence

SEQ ID NO: 961 - RNA, 90 nt, Artificial Sequence; identical to SEQ ID NO: 7
  Synthetic
  misc_feature: various 2'-OMe and a 3' PS linkages throughout sequence

SEQ ID NO: 962 - RNA, 90 nt, Artificial Sequence; identical to SEQ ID NO: 7
  Synthetic
  misc_feature: various 2'-OMe and a 3' PS linkages throughout sequence

SEQ ID NO: 963 - RNA, 90 nt, Artificial Sequence; identical to SEQ ID NO: 7
  Synthetic
  misc_feature: various 2'-OMe and 2'-fluoro modifications and 3' PS linkages throughout sequence

SEQ ID NO: 964 - RNA, 90 nt, Artificial Sequence; identical to SEQ ID NO: 7
  Synthetic
  misc_feature: various 2'-OMe and a 3' PS linkages throughout sequence

SEQ ID NO: 965 - RNA, 90 nt, Artificial Sequence; identical to SEQ ID NO: 7
  Synthetic
  misc_feature: various 2'-OMe and a 3' PS linkages throughout sequence

SEQ ID NO: 966 - RNA, 90 nt, Artificial Sequence; identical to SEQ ID NO: 7
  Synthetic
  misc_feature: various 2'-OMe and 2'-fluoro modifications and 3' PS linkages throughout sequence

SEQ ID NO: 967 - RNA, 90 nt, Artificial Sequence; identical to SEQ ID NO: 7
  Synthetic
  misc_feature: various 2'-OMe and a 3' PS linkages throughout sequence

SEQ ID NO: 968 - RNA, 90 nt, Artificial Sequence; identical to SEQ ID NO: 7
  Synthetic
  misc_feature: various 2'-OMe and 2'-fluoro modifications and 3' PS linkages throughout sequence

SEQ ID NO: 969 - RNA, 90 nt, Artificial Sequence; identical to SEQ ID NO: 855
  Synthetic
  misc_feature: various 2'-OMe and 2'-fluoro modifications and 3' PS linkages throughout sequence

SEQ ID NO: 970 - RNA, 90 nt, Artificial Sequence; identical to SEQ ID NO: 7
  Synthetic
  misc_feature: various 2'-OMe and 2'-fluoro modifications and 3' PS linkages throughout sequence

SEQ ID NO: 971 - RNA, 90 nt, Artificial Sequence; identical to SEQ ID NO: 7
  Synthetic
  misc_feature: various 2'-OMe and 2'-fluoro modifications and 3' PS linkages throughout sequence

SEQ ID NO: 972 - RNA, 90 nt, Artificial Sequence; identical to SEQ ID NO: 7
  Synthetic
  misc_feature: various 2'-OMe and 2'-fluoro modifications and 3' PS linkages throughout sequence

SEQ ID NO: 973 - RNA, 90 nt, Artificial Sequence; identical to SEQ ID NO: 7
  Synthetic
  misc_feature: various 2'-OMe and 2'-fluoro modifications and 3' PS linkages throughout sequence

SEQ ID NO: 974 - RNA, 90 nt, Artificial Sequence; identical to SEQ ID NO: 7
  Synthetic
  misc_feature: various 2'-OMe and 2'-fluoro modifications and 3' PS linkages throughout sequence

SEQ ID NO: 975 - RNA, 90 nt, Artificial Sequence; identical to SEQ ID NO: 7
  Synthetic
  misc_feature: various 2'-OMe and 2'-fluoro modifications and 3' PS linkages throughout sequence

SEQ ID NO: 976-1000 - skipped (25 entries)

SEQ ID NO: 1001 - protein, 7 aa, Artificial Sequence
  Synthetic
PKKKRKV

SEQ ID NO: 1002 - protein, 7 aa, Artificial Sequence
  Synthetic
PKKKRRV

SEQ ID NO: 1003 - protein, 16 aa, Artificial Sequence
  Synthetic
KRPAATKKAGQAKKKK

SEQ ID NO: 1004 - RNA, 10 nt, Artificial Sequence
  Synthetic
gcugaaaggc

SEQ ID NO: 1005 - RNA, 7 nt, Artificial Sequence
  Synthetic
gcaaagc

SEQ ID NO: 1006 - RNA, 10 nt, Artificial Sequence
  Synthetic
gcggaaacgc

SEQ ID NO: 1007 - RNA, 10 nt, Artificial Sequence
  Synthetic
gccgaaaggc

SEQ ID NO: 1008 - RNA, 11 nt, Artificial Sequence
  Synthetic
gcgcgaagcgc

SEQ ID NO: 1009-1098 - skipped (90 entries)

SEQ ID NO: 1099 - RNA, 4501 nt, Artificial Sequence
  Synthetic
gggucccgcagucggcguccagcggcucugcuuguucgugugugugucguugcaggccuuauucggauccgccaccauggacaagaaguacagcaucggacuggacaucggaacaaacagcgucggaugggcagucaucacagacgaauacaaggucccgagcaagaaguucaagguccugggaaacacagacagacacagcaucaagaagaaccugaucggagcacugcuguucgacagcggagaaacagcagaagcaacaagacugaagagaacagcaagaagaagauacacaagaagaaagaacagaaucugcuaccugcaggaaaucuucagcaacgaaauggcaaaggucgacgacagcuucuuccacagacuggaagaaagcuuccuggucgaagaagacaagaagcacgaaagacacccgaucuucggaaacaucgucgacgaagucgcauaccacgaaaaguacccgacaaucuaccaccugagaaagaagcuggucgacagcacagacaaggcagaccugagacugaucuaccuggcacuggcacacaugaucaaguucagaggacacuuccugaucgaaggagaccugaacccggacaacagcgacgucgacaagcuguucauccagcugguccagacauacaaccagcuguucgaagaaaacccgaucaacgcaagcggagucgacgcaaaggcaauccugagcgcaagacugagcaagagcagaagacuggaaaaccugaucgcacagcugccgggagaaaagaagaacggacuguucggaaaccugaucgcacugagccugggacugacaccgaacuucaagagcaacuucgaccuggcagaagacgcaaagcugcagcugagcaaggacacauacgacgacgaccuggacaaccugcuggcacagaucggagaccaguacgcagaccuguuccuggcagcaaagaaccugagcgacgcaauccugcugagcgacauccugagagucaacacagaaaucacaaaggcaccgcugagcgcaagcaugaucaagagauacgacgaacaccaccaggaccugacacugcugaaggcacuggucagacagcagcugccggaaaaguacaaggaaaucuucuucgaccagagcaagaacggauacgcaggauacaucgacggaggagcaagccaggaagaauucuacaaguucaucaagccgauccuggaaaagauggacggaacagaagaacugcuggucaagcugaacagagaagaccugcugagaaagcagagaacauucgacaacggaagcaucccgcaccagauccaccugggagaacugcacgcaauccugagaagacaggaagacuucuacccguuccugaaggacaacagagaaaagaucgaaaagauccugacauucagaaucccguacuacgucggaccgcuggcaagaggaaacagcagauucgcauggaugacaagaaagagcgaagaaacaaucacaccguggaacuucgaagaagucgucgacaagggagcaagcgcacagagcuucaucgaaagaaugacaaacuucgacaagaaccugccgaacgaaaagguccugccgaagcacagccugcuguacgaauacuucacagucuacaacgaacugacaaaggucaaguacgucacagaaggaaugagaaagccggcauuccugagcggagaacagaagaaggcaaucgucgaccugcuguucaagacaaacagaaaggucacagucaagcagcugaaggaagacuacuucaagaagaucgaaugcuucgacagcgucgaaaucagcggagucgaagacagauucaacgcaagccugggaacauaccacgaccugcugaagaucaucaaggacaaggacuuccuggacaacgaagaaaacgaagacauccuggaagacaucguccugacacugacacuguucgaagacagagaaaugaucgaagaaagacugaagacauacgcacaccuguucgacgacaaggucaugaagcagcugaagagaagaagauacacaggauggggaagacugagcagaaagcugaucaacggaaucagagacaagcagagcggaaagacaauccuggacuuccugaagagcgacggauucgcaaacagaaacuucaugcagcugauccacgacgacagccugacauucaaggaagacauccagaaggcacaggucagcggacagggagacagccugcacgaacacaucgcaaaccuggcaggaagcccggcaaucaagaagggaauccugcagacagucaaggucgucgacgaacuggucaaggucaugggaagacacaagccggaaaacaucgucaucgaaauggcaagagaaaaccagacaacacagaagggacagaagaacagcagagaaagaaugaagagaaucgaagaaggaaucaaggaacugggaagccagauccugaaggaacacccggucgaaaacacacagcugcagaacgaaaagcuguaccuguacuaccugcagaacggaagagacauguacgucgaccaggaacuggacaucaacagacugagcgacuacgacgucgaccacaucgucccgcagagcuuccugaaggacgacagcaucgacaacaagguccugacaagaagcgacaagaacagaggaaagagcgacaacgucccgagcgaagaagucgucaagaagaugaagaacuacuggagacagcugcugaacgcaaagcugaucacacagagaaaguucgacaaccugacaaaggcagagagaggaggacugagcgaacuggacaaggcaggauucaucaagagacagcuggucgaaacaagacagaucacaaagcacgucgcacagauccuggacagcagaaugaacacaaaguacgacgaaaacgacaagcugaucagagaagucaaggucaucacacugaagagcaagcuggucagcgacuucagaaaggacuuccaguucuacaaggucagagaaaucaacaacuaccaccacgcacacgacgcauaccugaacgcagucgucggaacagcacugaucaagaaguacccgaagcuggaaagcgaauucgucuacggagacuacaaggucuacgacgucagaaagaugaucgcaaagagcgaacaggaaaucggaaaggcaacagcaaaguacuucuucuacagcaacaucaugaacuucuucaagacagaaaucacacuggcaaacggagaaaucagaaagagaccgcugaucgaaacaaacggagaaacaggagaaaucgucugggacaagggaagagacuucgcaacagucagaaagguccugagcaugccgcaggucaacaucgucaagaagacagaaguccagacaggaggauucagcaaggaaagcauccugccgaagagaaacagcgacaagcugaucgcaagaaagaaggacugggacccgaagaaguacggaggauucgacagcccgacagucgcauacagcguccuggucgucgcaaaggucgaaaagggaaagagcaagaagcugaagagcgucaaggaacugcugggaaucacaaucauggaaagaagcagcuucgaaaagaacccgaucgacuuccuggaagcaaagggauacaaggaagucaagaaggaccugaucaucaagcugccgaaguacagccuguucgaacuggaaaacggaagaaagagaaugcuggcaagcgcaggagaacugcagaagggaaacgaacuggcacugccgagcaaguacgucaacuuccuguaccuggcaagccacuacgaaaagcugaagggaagcccggaagacaacgaacagaagcagcuguucgucgaacagcacaagcacuaccuggacgaaaucaucgaacagaucagcgaauucagcaagagagucauccuggcagacgcaaaccuggacaagguccugagcgcauacaacaagcacagagacaagccgaucagagaacaggcagaaaacaucauccaccuguucacacugacaaaccugggagcaccggcagcauucaaguacuucgacacaacaaucgacagaaagagauacacaagcacaaaggaaguccuggacgcaacacugauccaccagagcaucacaggacuguacgaaacaagaaucgaccugagccagcugggaggagacggaggaggaagcccgaagaagaagagaaaggucuagcuagccaucacauuuaaaagcaucucagccuaccaugagaauaagagaaagaaaaugaagaucaauagcuuauucaucucuuuuucuuuuucguugguguaaagccaacacccugucuaaaaaacauaaauuucuuuaaucauuuugccucuuuucucugugcuucaauuaauaaaaaauggaaagaaccucgagaaaaaaaaaaaaaaaaaaaaaaaaaaaaaaaaaaaaaaaaaaaaaaaaaaaaaaaaaaaaaaaaaaaaaaaaaaaaaaaaaaaaaaaaaa

SEQ ID NO: 1100 - RNA, 4499 nt, Artificial Sequence
  Synthetic
gggucccgcagucggcguccagcggcucugcuuguucgugugugugucguugcaggccuuauucggauccauggauaagaaguacucaaucgggcuggauaucggaacuaauuccguggguugggcagugaucacggaugaauacaaagugccguccaagaaguucaagguccuggggaacaccgauagacacagcaucaagaaaaaucucaucggagcccugcuguuugacuccggcgaaaccgcagaagcgacccggcucaaacguaccgcgaggcgacgcuacacccggcggaagaaucgcaucugcuaucugcaagagaucuuuucgaacgaaauggcaaaggucgacgacagcuucuuccaccgccuggaagaaucuuuccugguggaggaggacaagaagcaugaacggcauccuaucuuuggaaacaucgucgacgaaguggcguaccacgaaaaguacccgaccaucuaccaucugcggaagaaguugguugacucaacugacaaggccgaccucagauugaucuacuuggcccucgcccauaugaucaaauuccgcggacacuuccugaucgaaggcgaucugaacccugauaacuccgacguggauaagcuuuucauucaacuggugcagaccuacaaccaacuguucgaagaaaacccaaucaaugcuagcggcgucgaugccaaggccauccuguccgcccggcugucgaagucgcggcgccucgaaaaccugaucgcacagcugccgggagagaaaaagaacggacuuuucggcaacuugaucgcucucucacugggacucacucccaauuucaaguccaauuuugaccuggccgaggacgcgaagcugcaacucucaaaggacaccuacgacgacgacuuggacaauuugcuggcacaaauuggcgaucaguacgcggaucuguuccuugccgcuaagaaccuuucggacgcaaucuugcuguccgauauccugcgcgugaacaccgaaauaaccaaagcgccgcuuagcgccucgaugauuaagcgguacgacgagcaucaccaggaucucacgcugcucaaagcgcucgugagacagcaacugccugaaaaguacaaggagaucuucuucgaccaguccaagaauggguacgcaggguacaucgauggaggcgcuagccaggaagaguucuauaaguucaucaagccaauccuggaaaagauggacggaaccgaagaacugcuggucaagcugaacagggaggaucugcuccggaaacagagaaccuuugacaacggauccauuccccaccagauccaucugggugagcugcacgccaucuugcggcgccaggaggacuuuuacccauuccucaaggacaaccgggaaaagaucgagaaaauucugacguuccgcaucccguauuacgugggcccacuggcgcgcggcaauucgcgcuucgcguggaugacuagaaaaucagaggaaaccaucacuccuuggaauuucgaggaaguuguggauaagggagcuucggcacaaagcuucaucgaacgaaugaccaacuucgacaagaaucucccaaacgagaaggugcuuccuaagcacagccuccuuuacgaauacuucacugucuacaacgaacugacuaaagugaaauacguuacugaaggaaugaggaagccggccuuucuguccggagaacagaagaaagcaauugucgaucugcuguucaagaccaaccgcaaggugaccgucaagcagcuuaaagaggacuacuucaagaagaucgaguguuucgacucaguggaaaucagcgggguggaggacagauucaacgcuucgcugggaaccuaucaugaucuccugaagaucaucaaggacaaggacuuccuugacaacgaggagaacgaggacauccuggaagauaucguccugaccuugacccuuuucgaggaucgcgagaugaucgaggagaggcuuaagaccuacgcucaucucuucgacgauaaggucaugaaacaacucaagcgccgccgguacacugguuggggccgccucucccgcaagcugaucaacgguauucgcgauaaacagagcgguaaaacuauccuggauuuccucaaaucggauggcuucgcuaaucguaacuucaugcaauugauccacgacgacagccugaccuuuaaggaggacauccaaaaagcacaaguguccggacagggagacucacuccaugaacacaucgcgaaucuggccgguucgccggcgauuaagaagggaauucugcaaacugugaagguggucgacgagcuggugaaggucaugggacggcacaaaccggagaauaucgugauugaaauggcccgagaaaaccagacuacccagaagggccagaaaaacucccgcgaaaggaugaagcggaucgaagaaggaaucaaggagcugggcagccagauccugaaagagcacccgguggaaaacacgcagcugcagaacgagaagcucuaccuguacuauuugcaaaauggacgggacauguacguggaccaagagcuggacaucaaucgguugucugauuacgacguggaccacaucguuccacaguccuuucugaaggaugacucgaucgauaacaagguguugacucgcagcgacaagaacagagggaagucagauaaugugccaucggaggaggucgugaagaagaugaagaauuacuggcggcagcuccugaaugcgaagcugauuacccagagaaaguuugacaaucucacuaaagccgagcgcggcggacucucagagcuggauaaggcuggauucaucaaacggcagcuggucgagacucggcagauuaccaagcacguggcgcagaucuuggacucccgcaugaacacuaaauacgacgagaacgauaagcucauccgggaagugaaggugauuacccugaaaagcaaacuugugucggacuuucggaaggacuuucaguuuuacaaagugagagaaaucaacaacuaccaucacgcgcaugacgcauaccucaacgcuguggucgguaccgcccugaucaaaaaguacccuaaacuugaaucggaguuuguguacggagacuacaaggucuacgacgugaggaagaugauagccaaguccgaacaggaaaucgggaaagcaacugcgaaauacuucuuuuacucaaacaucaugaacuuuuucaagacugaaauuacgcuggccaauggagaaaucaggaagaggccacugaucgaaacuaacggagaaacgggcgaaaucgugugggacaagggcagggacuucgcaacuguucgcaaagugcucucuaugccgcaagucaauauugugaagaaaaccgaagugcaaaccggcggauuuucaaaggaaucgauccucccaaagagaaauagcgacaagcucauugcacgcaagaaagacugggacccgaagaaguacggaggauucgauucgccgacugucgcauacuccguccucgugguggccaagguggagaagggaaagagcaaaaagcucaaauccgucaaagagcugcuggggauuaccaucauggaacgauccucguucgagaagaacccgauugauuuccucgaggcgaaggguuacaaggaggugaagaaggaucugaucaucaaacuccccaaguacucacuguucgaacuggaaaauggucggaagcgcaugcuggcuucggccggagaacuccaaaaaggaaaugagcuggccuugccuagcaaguacgucaacuuccucuaucuugcuucgcacuacgaaaaacucaaagggucaccggaagauaacgaacagaagcagcuuuucguggagcagcacaagcauuaucuggaugaaaucaucgaacaaaucuccgaguuuucaaagcgcgugauccucgccgacgccaaccucgacaaaguccugucggccuacaauaagcauagagauaagccgaucagagaacaggccgagaacauuauccacuuguucacccugacuaaccugggagccccagccgccuucaaguacuucgauacuacuaucgaucgcaaaagauacacguccaccaaggaaguucuggacgcgacccugauccaccaaagcaucacuggacucuacgaaacuaggaucgaucugucgcagcuggguggcgauggcgguggaucuccgaaaaagaagagaaagguguaaugagcuagccaucacauuuaaaagcaucucagccuaccaugagaauaagagaaagaaaaugaagaucaauagcuuauucaucucuuuuucuuuuucguugguguaaagccaacacccugucuaaaaaacauaaauuucuuuaaucauuuugccucuuuucucugugcuucaauuaauaaaaaauggaaagaaccucgagaaaaaaaaaaaaaaaaaaaaaaaaaaaaaaaaaaaaaaaaaaaaaaaaaaaaaaaaaaaaaaaaaaaaaaaaaaaaaaaaaaaaaaaaaa

SEQ ID NO: 1101 - DNA, 4411 bp, Artificial Sequence
  Synthetic
gggtcccgcagtcggcgtccagcggctctgcttgttcgtgtgtgtgtcgttgcaggccttattcggatccgccaccatggacaagaagtacagcatcggactggacatcggaacaaacagcgtcggatgggcagtcatcacagacgaatacaaggtcccgagcaagaagttcaaggtcctgggaaacacagacagacacagcatcaagaagaacctgatcggagcactgctgttcgacagcggagaaacagcagaagcaacaagactgaagagaacagcaagaagaagatacacaagaagaaagaacagaatctgctacctgcaggaaatcttcagcaacgaaatggcaaaggtcgacgacagcttcttccacagactggaagaaagcttcctggtcgaagaagacaagaagcacgaaagacacccgatcttcggaaacatcgtcgacgaagtcgcataccacgaaaagtacccgacaatctaccacctgagaaagaagctggtcgacagcacagacaaggcagacctgagactgatctacctggcactggcacacatgatcaagttcagaggacacttcctgatcgaaggagacctgaacccggacaacagcgacgtcgacaagctgttcatccagctggtccagacatacaaccagctgttcgaagaaaacccgatcaacgcaagcggagtcgacgcaaaggcaatcctgagcgcaagactgagcaagagcagaagactggaaaacctgatcgcacagctgccgggagaaaagaagaacggactgttcggaaacctgatcgcactgagcctgggactgacaccgaacttcaagagcaacttcgacctggcagaagacgcaaagctgcagctgagcaaggacacatacgacgacgacctggacaacctgctggcacagatcggagaccagtacgcagacctgttcctggcagcaaagaacctgagcgacgcaatcctgctgagcgacatcctgagagtcaacacagaaatcacaaaggcaccgctgagcgcaagcatgatcaagagatacgacgaacaccaccaggacctgacactgctgaaggcactggtcagacagcagctgccggaaaagtacaaggaaatcttcttcgaccagagcaagaacggatacgcaggatacatcgacggaggagcaagccaggaagaattctacaagttcatcaagccgatcctggaaaagatggacggaacagaagaactgctggtcaagctgaacagagaagacctgctgagaaagcagagaacattcgacaacggaagcatcccgcaccagatccacctgggagaactgcacgcaatcctgagaagacaggaagacttctacccgttcctgaaggacaacagagaaaagatcgaaaagatcctgacattcagaatcccgtactacgtcggaccgctggcaagaggaaacagcagattcgcatggatgacaagaaagagcgaagaaacaatcacaccgtggaacttcgaagaagtcgtcgacaagggagcaagcgcacagagcttcatcgaaagaatgacaaacttcgacaagaacctgccgaacgaaaaggtcctgccgaagcacagcctgctgtacgaatacttcacagtctacaacgaactgacaaaggtcaagtacgtcacagaaggaatgagaaagccggcattcctgagcggagaacagaagaaggcaatcgtcgacctgctgttcaagacaaacagaaaggtcacagtcaagcagctgaaggaagactacttcaagaagatcgaatgcttcgacagcgtcgaaatcagcggagtcgaagacagattcaacgcaagcctgggaacataccacgacctgctgaagatcatcaaggacaaggacttcctggacaacgaagaaaacgaagacatcctggaagacatcgtcctgacactgacactgttcgaagacagagaaatgatcgaagaaagactgaagacatacgcacacctgttcgacgacaaggtcatgaagcagctgaagagaagaagatacacaggatggggaagactgagcagaaagctgatcaacggaatcagagacaagcagagcggaaagacaatcctggacttcctgaagagcgacggattcgcaaacagaaacttcatgcagctgatccacgacgacagcctgacattcaaggaagacatccagaaggcacaggtcagcggacagggagacagcctgcacgaacacatcgcaaacctggcaggaagcccggcaatcaagaagggaatcctgcagacagtcaaggtcgtcgacgaactggtcaaggtcatgggaagacacaagccggaaaacatcgtcatcgaaatggcaagagaaaaccagacaacacagaagggacagaagaacagcagagaaagaatgaagagaatcgaagaaggaatcaaggaactgggaagccagatcctgaaggaacacccggtcgaaaacacacagctgcagaacgaaaagctgtacctgtactacctgcagaacggaagagacatgtacgtcgaccaggaactggacatcaacagactgagcgactacgacgtcgaccacatcgtcccgcagagcttcctgaaggacgacagcatcgacaacaaggtcctgacaagaagcgacaagaacagaggaaagagcgacaacgtcccgagcgaagaagtcgtcaagaagatgaagaactactggagacagctgctgaacgcaaagctgatcacacagagaaagttcgacaacctgacaaaggcagagagaggaggactgagcgaactggacaaggcaggattcatcaagagacagctggtcgaaacaagacagatcacaaagcacgtcgcacagatcctggacagcagaatgaacacaaagtacgacgaaaacgacaagctgatcagagaagtcaaggtcatcacactgaagagcaagctggtcagcgacttcagaaaggacttccagttctacaaggtcagagaaatcaacaactaccaccacgcacacgacgcatacctgaacgcagtcgtcggaacagcactgatcaagaagtacccgaagctggaaagcgaattcgtctacggagactacaaggtctacgacgtcagaaagatgatcgcaaagagcgaacaggaaatcggaaaggcaacagcaaagtacttcttctacagcaacatcatgaacttcttcaagacagaaatcacactggcaaacggagaaatcagaaagagaccgctgatcgaaacaaacggagaaacaggagaaatcgtctgggacaagggaagagacttcgcaacagtcagaaaggtcctgagcatgccgcaggtcaacatcgtcaagaagacagaagtccagacaggaggattcagcaaggaaagcatcctgccgaagagaaacagcgacaagctgatcgcaagaaagaaggactgggacccgaagaagtacggaggattcgacagcccgacagtcgcatacagcgtcctggtcgtcgcaaaggtcgaaaagggaaagagcaagaagctgaagagcgtcaaggaactgctgggaatcacaatcatggaaagaagcagcttcgaaaagaacccgatcgacttcctggaagcaaagggatacaaggaagtcaagaaggacctgatcatcaagctgccgaagtacagcctgttcgaactggaaaacggaagaaagagaatgctggcaagcgcaggagaactgcagaagggaaacgaactggcactgccgagcaagtacgtcaacttcctgtacctggcaagccactacgaaaagctgaagggaagcccggaagacaacgaacagaagcagctgttcgtcgaacagcacaagcactacctggacgaaatcatcgaacagatcagcgaattcagcaagagagtcatcctggcagacgcaaacctggacaaggtcctgagcgcatacaacaagcacagagacaagccgatcagagaacaggcagaaaacatcatccacctgttcacactgacaaacctgggagcaccggcagcattcaagtacttcgacacaacaatcgacagaaagagatacacaagcacaaaggaagtcctggacgcaacactgatccaccagagcatcacaggactgtacgaaacaagaatcgacctgagccagctgggaggagacggaggaggaagcccgaagaagaagagaaaggtctagctagccatcacatttaaaagcatctcagcctaccatgagaataagagaaagaaaatgaagatcaatagcttattcatctctttttctttttcgttggtgtaaagccaacaccctgtctaaaaaacataaatttctttaatcattttgcctcttttctctgtgcttcaattaataaaaaatggaaagaacctcgag

SEQ ID NO: 1102 - DNA, 4140 bp, Artificial Sequence
  Synthetic
atggacaagaagtacagcatcggactggacatcggaacaaacagcgtcggatgggcagtcatcacagacgaatacaaggtcccgagcaagaagttcaaggtcctgggaaacacagacagacacagcatcaagaagaacctgatcggagcactgctgttcgacagcggagaaacagcagaagcaacaagactgaagagaacagcaagaagaagatacacaagaagaaagaacagaatctgctacctgcaggaaatcttcagcaacgaaatggcaaaggtcgacgacagcttcttccacagactggaagaaagcttcctggtcgaagaagacaagaagcacgaaagacacccgatcttcggaaacatcgtcgacgaagtcgcataccacgaaaagtacccgacaatctaccacctgagaaagaagctggtcgacagcacagacaaggcagacctgagactgatctacctggcactggcacacatgatcaagttcagaggacacttcctgatcgaaggagacctgaacccggacaacagcgacgtcgacaagctgttcatccagctggtccagacatacaaccagctgttcgaagaaaacccgatcaacgcaagcggagtcgacgcaaaggcaatcctgagcgcaagactgagcaagagcagaagactggaaaacctgatcgcacagctgccgggagaaaagaagaacggactgttcggaaacctgatcgcactgagcctgggactgacaccgaacttcaagagcaacttcgacctggcagaagacgcaaagctgcagctgagcaaggacacatacgacgacgacctggacaacctgctggcacagatcggagaccagtacgcagacctgttcctggcagcaaagaacctgagcgacgcaatcctgctgagcgacatcctgagagtcaacacagaaatcacaaaggcaccgctgagcgcaagcatgatcaagagatacgacgaacaccaccaggacctgacactgctgaaggcactggtcagacagcagctgccggaaaagtacaaggaaatcttcttcgaccagagcaagaacggatacgcaggatacatcgacggaggagcaagccaggaagaattctacaagttcatcaagccgatcctggaaaagatggacggaacagaagaactgctggtcaagctgaacagagaagacctgctgagaaagcagagaacattcgacaacggaagcatcccgcaccagatccacctgggagaactgcacgcaatcctgagaagacaggaagacttctacccgttcctgaaggacaacagagaaaagatcgaaaagatcctgacattcagaatcccgtactacgtcggaccgctggcaagaggaaacagcagattcgcatggatgacaagaaagagcgaagaaacaatcacaccgtggaacttcgaagaagtcgtcgacaagggagcaagcgcacagagcttcatcgaaagaatgacaaacttcgacaagaacctgccgaacgaaaaggtcctgccgaagcacagcctgctgtacgaatacttcacagtctacaacgaactgacaaaggtcaagtacgtcacagaaggaatgagaaagccggcattcctgagcggagaacagaagaaggcaatcgtcgacctgctgttcaagacaaacagaaaggtcacagtcaagcagctgaaggaagactacttcaagaagatcgaatgcttcgacagcgtcgaaatcagcggagtcgaagacagattcaacgcaagcctgggaacataccacgacctgctgaagatcatcaaggacaaggacttcctggacaacgaagaaaacgaagacatcctggaagacatcgtcctgacactgacactgttcgaagacagagaaatgatcgaagaaagactgaagacatacgcacacctgttcgacgacaaggtcatgaagcagctgaagagaagaagatacacaggatggggaagactgagcagaaagctgatcaacggaatcagagacaagcagagcggaaagacaatcctggacttcctgaagagcgacggattcgcaaacagaaacttcatgcagctgatccacgacgacagcctgacattcaaggaagacatccagaaggcacaggtcagcggacagggagacagcctgcacgaacacatcgcaaacctggcaggaagcccggcaatcaagaagggaatcctgcagacagtcaaggtcgtcgacgaactggtcaaggtcatgggaagacacaagccggaaaacatcgtcatcgaaatggcaagagaaaaccagacaacacagaagggacagaagaacagcagagaaagaatgaagagaatcgaagaaggaatcaaggaactgggaagccagatcctgaaggaacacccggtcgaaaacacacagctgcagaacgaaaagctgtacctgtactacctgcagaacggaagagacatgtacgtcgaccaggaactggacatcaacagactgagcgactacgacgtcgaccacatcgtcccgcagagcttcctgaaggacgacagcatcgacaacaaggtcctgacaagaagcgacaagaacagaggaaagagcgacaacgtcccgagcgaagaagtcgtcaagaagatgaagaactactggagacagctgctgaacgcaaagctgatcacacagagaaagttcgacaacctgacaaaggcagagagaggaggactgagcgaactggacaaggcaggattcatcaagagacagctggtcgaaacaagacagatcacaaagcacgtcgcacagatcctggacagcagaatgaacacaaagtacgacgaaaacgacaagctgatcagagaagtcaaggtcatcacactgaagagcaagctggtcagcgacttcagaaaggacttccagttctacaaggtcagagaaatcaacaactaccaccacgcacacgacgcatacctgaacgcagtcgtcggaacagcactgatcaagaagtacccgaagctggaaagcgaattcgtctacggagactacaaggtctacgacgtcagaaagatgatcgcaaagagcgaacaggaaatcggaaaggcaacagcaaagtacttcttctacagcaacatcatgaacttcttcaagacagaaatcacactggcaaacggagaaatcagaaagagaccgctgatcgaaacaaacggagaaacaggagaaatcgtctgggacaagggaagagacttcgcaacagtcagaaaggtcctgagcatgccgcaggtcaacatcgtcaagaagacagaagtccagacaggaggattcagcaaggaaagcatcctgccgaagagaaacagcgacaagctgatcgcaagaaagaaggactgggacccgaagaagtacggaggattcgacagcccgacagtcgcatacagcgtcctggtcgtcgcaaaggtcgaaaagggaaagagcaagaagctgaagagcgtcaaggaactgctgggaatcacaatcatggaaagaagcagcttcgaaaagaacccgatcgacttcctggaagcaaagggatacaaggaagtcaagaaggacctgatcatcaagctgccgaagtacagcctgttcgaactggaaaacggaagaaagagaatgctggcaagcgcaggagaactgcagaagggaaacgaactggcactgccgagcaagtacgtcaacttcctgtacctggcaagccactacgaaaagctgaagggaagcccggaagacaacgaacagaagcagctgttcgtcgaacagcacaagcactacctggacgaaatcatcgaacagatcagcgaattcagcaagagagtcatcctggcagacgcaaacctggacaaggtcctgagcgcatacaacaagcacagagacaagccgatcagagaacaggcagaaaacatcatccacctgttcacactgacaaacctgggagcaccggcagcattcaagtacttcgacacaacaatcgacagaaagagatacacaagcacaaaggaagtcctggacgcaacactgatccaccagagcatcacaggactgtacgaaacaagaatcgacctgagccagctgggaggagacggaggaggaagcccgaagaagaagagaaaggtctag

SEQ ID NO: 1103 - DNA, 4143 bp, Artificial Sequence
  Synthetic
atggataagaagtactcaatcgggctggatatcggaactaattccgtgggttgggcagtgatcacggatgaatacaaagtgccgtccaagaagttcaaggtcctggggaacaccgatagacacagcatcaagaaaaatctcatcggagccctgctgtttgactccggcgaaaccgcagaagcgacccggctcaaacgtaccgcgaggcgacgctacacccggcggaagaatcgcatctgctatctgcaagagatcttttcgaacgaaatggcaaaggtcgacgacagcttcttccaccgcctggaagaatctttcctggtggaggaggacaagaagcatgaacggcatcctatctttggaaacatcgtcgacgaagtggcgtaccacgaaaagtacccgaccatctaccatctgcggaagaagttggttgactcaactgacaaggccgacctcagattgatctacttggccctcgcccatatgatcaaattccgcggacacttcctgatcgaaggcgatctgaaccctgataactccgacgtggataagcttttcattcaactggtgcagacctacaaccaactgttcgaagaaaacccaatcaatgctagcggcgtcgatgccaaggccatcctgtccgcccggctgtcgaagtcgcggcgcctcgaaaacctgatcgcacagctgccgggagagaaaaagaacggacttttcggcaacttgatcgctctctcactgggactcactcccaatttcaagtccaattttgacctggccgaggacgcgaagctgcaactctcaaaggacacctacgacgacgacttggacaatttgctggcacaaattggcgatcagtacgcggatctgttccttgccgctaagaacctttcggacgcaatcttgctgtccgatatcctgcgcgtgaacaccgaaataaccaaagcgccgcttagcgcctcgatgattaagcggtacgacgagcatcaccaggatctcacgctgctcaaagcgctcgtgagacagcaactgcctgaaaagtacaaggagatcttcttcgaccagtccaagaatgggtacgcagggtacatcgatggaggcgctagccaggaagagttctataagttcatcaagccaatcctggaaaagatggacggaaccgaagaactgctggtcaagctgaacagggaggatctgctccggaaacagagaacctttgacaacggatccattccccaccagatccatctgggtgagctgcacgccatcttgcggcgccaggaggacttttacccattcctcaaggacaaccgggaaaagatcgagaaaattctgacgttccgcatcccgtattacgtgggcccactggcgcgcggcaattcgcgcttcgcgtggatgactagaaaatcagaggaaaccatcactccttggaatttcgaggaagttgtggataagggagcttcggcacaaagcttcatcgaacgaatgaccaacttcgacaagaatctcccaaacgagaaggtgcttcctaagcacagcctcctttacgaatacttcactgtctacaacgaactgactaaagtgaaatacgttactgaaggaatgaggaagccggcctttctgtccggagaacagaagaaagcaattgtcgatctgctgttcaagaccaaccgcaaggtgaccgtcaagcagcttaaagaggactacttcaagaagatcgagtgtttcgactcagtggaaatcagcggggtggaggacagattcaacgcttcgctgggaacctatcatgatctcctgaagatcatcaaggacaaggacttccttgacaacgaggagaacgaggacatcctggaagatatcgtcctgaccttgacccttttcgaggatcgcgagatgatcgaggagaggcttaagacctacgctcatctcttcgacgataaggtcatgaaacaactcaagcgccgccggtacactggttggggccgcctctcccgcaagctgatcaacggtattcgcgataaacagagcggtaaaactatcctggatttcctcaaatcggatggcttcgctaatcgtaacttcatgcaattgatccacgacgacagcctgacctttaaggaggacatccaaaaagcacaagtgtccggacagggagactcactccatgaacacatcgcgaatctggccggttcgccggcgattaagaagggaattctgcaaactgtgaaggtggtcgacgagctggtgaaggtcatgggacggcacaaaccggagaatatcgtgattgaaatggcccgagaaaaccagactacccagaagggccagaaaaactcccgcgaaaggatgaagcggatcgaagaaggaatcaaggagctgggcagccagatcctgaaagagcacccggtggaaaacacgcagctgcagaacgagaagctctacctgtactatttgcaaaatggacgggacatgtacgtggaccaagagctggacatcaatcggttgtctgattacgacgtggaccacatcgttccacagtcctttctgaaggatgactcgatcgataacaaggtgttgactcgcagcgacaagaacagagggaagtcagataatgtgccatcggaggaggtcgtgaagaagatgaagaattactggcggcagctcctgaatgcgaagctgattacccagagaaagtttgacaatctcactaaagccgagcgcggcggactctcagagctggataaggctggattcatcaaacggcagctggtcgagactcggcagattaccaagcacgtggcgcagatcttggactcccgcatgaacactaaatacgacgagaacgataagctcatccgggaagtgaaggtgattaccctgaaaagcaaacttgtgtcggactttcggaaggactttcagttttacaaagtgagagaaatcaacaactaccatcacgcgcatgacgcatacctcaacgctgtggtcggtaccgccctgatcaaaaagtaccctaaacttgaatcggagtttgtgtacggagactacaaggtctacgacgtgaggaagatgatagccaagtccgaacaggaaatcgggaaagcaactgcgaaatacttcttttactcaaacatcatgaactttttcaagactgaaattacgctggccaatggagaaatcaggaagaggccactgatcgaaactaacggagaaacgggcgaaatcgtgtgggacaagggcagggacttcgcaactgttcgcaaagtgctctctatgccgcaagtcaatattgtgaagaaaaccgaagtgcaaaccggcggattttcaaaggaatcgatcctcccaaagagaaatagcgacaagctcattgcacgcaagaaagactgggacccgaagaagtacggaggattcgattcgccgactgtcgcatactccgtcctcgtggtggccaaggtggagaagggaaagagcaaaaagctcaaatccgtcaaagagctgctggggattaccatcatggaacgatcctcgttcgagaagaacccgattgatttcctcgaggcgaagggttacaaggaggtgaagaaggatctgatcatcaaactccccaagtactcactgttcgaactggaaaatggtcggaagcgcatgctggcttcggccggagaactccaaaaaggaaatgagctggccttgcctagcaagtacgtcaacttcctctatcttgcttcgcactacgaaaaactcaaagggtcaccggaagataacgaacagaagcagcttttcgtggagcagcacaagcattatctggatgaaatcatcgaacaaatctccgagttttcaaagcgcgtgatcctcgccgacgccaacctcgacaaagtcctgtcggcctacaataagcatagagataagccgatcagagaacaggccgagaacattatccacttgttcaccctgactaacctgggagccccagccgccttcaagtacttcgatactactatcgatcgcaaaagatacacgtccaccaaggaagttctggacgcgaccctgatccaccaaagcatcactggactctacgaaactaggatcgatctgtcgcagctgggtggcgatggcggtggatctccgaaaaagaagagaaaggtgtaatga

SEQ ID NO: 1104 - RNA, 4140 nt, Artificial Sequence
  Synthetic
auggacaagaaguacagcaucggacuggacaucggaacaaacagcgucggaugggcagucaucacagacgaauacaaggucccgagcaagaaguucaagguccugggaaacacagacagacacagcaucaagaagaaccugaucggagcacugcuguucgacagcggagaaacagcagaagcaacaagacugaagagaacagcaagaagaagauacacaagaagaaagaacagaaucugcuaccugcaggaaaucuucagcaacgaaauggcaaaggucgacgacagcuucuuccacagacuggaagaaagcuuccuggucgaagaagacaagaagcacgaaagacacccgaucuucggaaacaucgucgacgaagucgcauaccacgaaaaguacccgacaaucuaccaccugagaaagaagcuggucgacagcacagacaaggcagaccugagacugaucuaccuggcacuggcacacaugaucaaguucagaggacacuuccugaucgaaggagaccugaacccggacaacagcgacgucgacaagcuguucauccagcugguccagacauacaaccagcuguucgaagaaaacccgaucaacgcaagcggagucgacgcaaaggcaauccugagcgcaagacugagcaagagcagaagacuggaaaaccugaucgcacagcugccgggagaaaagaagaacggacuguucggaaaccugaucgcacugagccugggacugacaccgaacuucaagagcaacuucgaccuggcagaagacgcaaagcugcagcugagcaaggacacauacgacgacgaccuggacaaccugcuggcacagaucggagaccaguacgcagaccuguuccuggcagcaaagaaccugagcgacgcaauccugcugagcgacauccugagagucaacacagaaaucacaaaggcaccgcugagcgcaagcaugaucaagagauacgacgaacaccaccaggaccugacacugcugaaggcacuggucagacagcagcugccggaaaaguacaaggaaaucuucuucgaccagagcaagaacggauacgcaggauacaucgacggaggagcaagccaggaagaauucuacaaguucaucaagccgauccuggaaaagauggacggaacagaagaacugcuggucaagcugaacagagaagaccugcugagaaagcagagaacauucgacaacggaagcaucccgcaccagauccaccugggagaacugcacgcaauccugagaagacaggaagacuucuacccguuccugaaggacaacagagaaaagaucgaaaagauccugacauucagaaucccguacuacgucggaccgcuggcaagaggaaacagcagauucgcauggaugacaagaaagagcgaagaaacaaucacaccguggaacuucgaagaagucgucgacaagggagcaagcgcacagagcuucaucgaaagaaugacaaacuucgacaagaaccugccgaacgaaaagguccugccgaagcacagccugcuguacgaauacuucacagucuacaacgaacugacaaaggucaaguacgucacagaaggaaugagaaagccggcauuccugagcggagaacagaagaaggcaaucgucgaccugcuguucaagacaaacagaaaggucacagucaagcagcugaaggaagacuacuucaagaagaucgaaugcuucgacagcgucgaaaucagcggagucgaagacagauucaacgcaagccugggaacauaccacgaccugcugaagaucaucaaggacaaggacuuccuggacaacgaagaaaacgaagacauccuggaagacaucguccugacacugacacuguucgaagacagagaaaugaucgaagaaagacugaagacauacgcacaccuguucgacgacaaggucaugaagcagcugaagagaagaagauacacaggauggggaagacugagcagaaagcugaucaacggaaucagagacaagcagagcggaaagacaauccuggacuuccugaagagcgacggauucgcaaacagaaacuucaugcagcugauccacgacgacagccugacauucaaggaagacauccagaaggcacaggucagcggacagggagacagccugcacgaacacaucgcaaaccuggcaggaagcccggcaaucaagaagggaauccugcagacagucaaggucgucgacgaacuggucaaggucaugggaagacacaagccggaaaacaucgucaucgaaauggcaagagaaaaccagacaacacagaagggacagaagaacagcagagaaagaaugaagagaaucgaagaaggaaucaaggaacugggaagccagauccugaaggaacacccggucgaaaacacacagcugcagaacgaaaagcuguaccuguacuaccugcagaacggaagagacauguacgucgaccaggaacuggacaucaacagacugagcgacuacgacgucgaccacaucgucccgcagagcuuccugaaggacgacagcaucgacaacaagguccugacaagaagcgacaagaacagaggaaagagcgacaacgucccgagcgaagaagucgucaagaagaugaagaacuacuggagacagcugcugaacgcaaagcugaucacacagagaaaguucgacaaccugacaaaggcagagagaggaggacugagcgaacuggacaaggcaggauucaucaagagacagcuggucgaaacaagacagaucacaaagcacgucgcacagauccuggacagcagaaugaacacaaaguacgacgaaaacgacaagcugaucagagaagucaaggucaucacacugaagagcaagcuggucagcgacuucagaaaggacuuccaguucuacaaggucagagaaaucaacaacuaccaccacgcacacgacgcauaccugaacgcagucgucggaacagcacugaucaagaaguacccgaagcuggaaagcgaauucgucuacggagacuacaaggucuacgacgucagaaagaugaucgcaaagagcgaacaggaaaucggaaaggcaacagcaaaguacuucuucuacagcaacaucaugaacuucuucaagacagaaaucacacuggcaaacggagaaaucagaaagagaccgcugaucgaaacaaacggagaaacaggagaaaucgucugggacaagggaagagacuucgcaacagucagaaagguccugagcaugccgcaggucaacaucgucaagaagacagaaguccagacaggaggauucagcaaggaaagcauccugccgaagagaaacagcgacaagcugaucgcaagaaagaaggacugggacccgaagaaguacggaggauucgacagcccgacagucgcauacagcguccuggucgucgcaaaggucgaaaagggaaagagcaagaagcugaagagcgucaaggaacugcugggaaucacaaucauggaaagaagcagcuucgaaaagaacccgaucgacuuccuggaagcaaagggauacaaggaagucaagaaggaccugaucaucaagcugccgaaguacagccuguucgaacuggaaaacggaagaaagagaaugcuggcaagcgcaggagaacugcagaagggaaacgaacuggcacugccgagcaaguacgucaacuuccuguaccuggcaagccacuacgaaaagcugaagggaagcccggaagacaacgaacagaagcagcuguucgucgaacagcacaagcacuaccuggacgaaaucaucgaacagaucagcgaauucagcaagagagucauccuggcagacgcaaaccuggacaagguccugagcgcauacaacaagcacagagacaagccgaucagagaacaggcagaaaacaucauccaccuguucacacugacaaaccugggagcaccggcagcauucaaguacuucgacacaacaaucgacagaaagagauacacaagcacaaaggaaguccuggacgcaacacugauccaccagagcaucacaggacuguacgaaacaagaaucgaccugagccagcugggaggagacggaggaggaagcccgaagaagaagagaaaggucuag

SEQ ID NO: 1105 - RNA, 4143 nt, Artificial Sequence
  Synthetic
auggauaagaaguacucaaucgggcuggauaucggaacuaauuccguggguugggcagugaucacggaugaauacaaagugccguccaagaaguucaagguccuggggaacaccgauagacacagcaucaagaaaaaucucaucggagcccugcuguuugacuccggcgaaaccgcagaagcgacccggcucaaacguaccgcgaggcgacgcuacacccggcggaagaaucgcaucugcuaucugcaagagaucuuuucgaacgaaauggcaaaggucgacgacagcuucuuccaccgccuggaagaaucuuuccugguggaggaggacaagaagcaugaacggcauccuaucuuuggaaacaucgucgacgaaguggcguaccacgaaaaguacccgaccaucuaccaucugcggaagaaguugguugacucaacugacaaggccgaccucagauugaucuacuuggcccucgcccauaugaucaaauuccgcggacacuuccugaucgaaggcgaucugaacccugauaacuccgacguggauaagcuuuucauucaacuggugcagaccuacaaccaacuguucgaagaaaacccaaucaaugcuagcggcgucgaugccaaggccauccuguccgcccggcugucgaagucgcggcgccucgaaaaccugaucgcacagcugccgggagagaaaaagaacggacuuuucggcaacuugaucgcucucucacugggacucacucccaauuucaaguccaauuuugaccuggccgaggacgcgaagcugcaacucucaaaggacaccuacgacgacgacuuggacaauuugcuggcacaaauuggcgaucaguacgcggaucuguuccuugccgcuaagaaccuuucggacgcaaucuugcuguccgauauccugcgcgugaacaccgaaauaaccaaagcgccgcuuagcgccucgaugauuaagcgguacgacgagcaucaccaggaucucacgcugcucaaagcgcucgugagacagcaacugccugaaaaguacaaggagaucuucuucgaccaguccaagaauggguacgcaggguacaucgauggaggcgcuagccaggaagaguucuauaaguucaucaagccaauccuggaaaagauggacggaaccgaagaacugcuggucaagcugaacagggaggaucugcuccggaaacagagaaccuuugacaacggauccauuccccaccagauccaucugggugagcugcacgccaucuugcggcgccaggaggacuuuuacccauuccucaaggacaaccgggaaaagaucgagaaaauucugacguuccgcaucccguauuacgugggcccacuggcgcgcggcaauucgcgcuucgcguggaugacuagaaaaucagaggaaaccaucacuccuuggaauuucgaggaaguuguggauaagggagcuucggcacaaagcuucaucgaacgaaugaccaacuucgacaagaaucucccaaacgagaaggugcuuccuaagcacagccuccuuuacgaauacuucacugucuacaacgaacugacuaaagugaaauacguuacugaaggaaugaggaagccggccuuucuguccggagaacagaagaaagcaauugucgaucugcuguucaagaccaaccgcaaggugaccgucaagcagcuuaaagaggacuacuucaagaagaucgaguguuucgacucaguggaaaucagcgggguggaggacagauucaacgcuucgcugggaaccuaucaugaucuccugaagaucaucaaggacaaggacuuccuugacaacgaggagaacgaggacauccuggaagauaucguccugaccuugacccuuuucgaggaucgcgagaugaucgaggagaggcuuaagaccuacgcucaucucuucgacgauaaggucaugaaacaacucaagcgccgccgguacacugguuggggccgccucucccgcaagcugaucaacgguauucgcgauaaacagagcgguaaaacuauccuggauuuccucaaaucggauggcuucgcuaaucguaacuucaugcaauugauccacgacgacagccugaccuuuaaggaggacauccaaaaagcacaaguguccggacagggagacucacuccaugaacacaucgcgaaucuggccgguucgccggcgauuaagaagggaauucugcaaacugugaagguggucgacgagcuggugaaggucaugggacggcacaaaccggagaauaucgugauugaaauggcccgagaaaaccagacuacccagaagggccagaaaaacucccgcgaaaggaugaagcggaucgaagaaggaaucaaggagcugggcagccagauccugaaagagcacccgguggaaaacacgcagcugcagaacgagaagcucuaccuguacuauuugcaaaauggacgggacauguacguggaccaagagcuggacaucaaucgguugucugauuacgacguggaccacaucguuccacaguccuuucugaaggaugacucgaucgauaacaagguguugacucgcagcgacaagaacagagggaagucagauaaugugccaucggaggaggucgugaagaagaugaagaauuacuggcggcagcuccugaaugcgaagcugauuacccagagaaaguuugacaaucucacuaaagccgagcgcggcggacucucagagcuggauaaggcuggauucaucaaacggcagcuggucgagacucggcagauuaccaagcacguggcgcagaucuuggacucccgcaugaacacuaaauacgacgagaacgauaagcucauccgggaagugaaggugauuacccugaaaagcaaacuugugucggacuuucggaaggacuuucaguuuuacaaagugagagaaaucaacaacuaccaucacgcgcaugacgcauaccucaacgcuguggucgguaccgcccugaucaaaaaguacccuaaacuugaaucggaguuuguguacggagacuacaaggucuacgacgugaggaagaugauagccaaguccgaacaggaaaucgggaaagcaacugcgaaauacuucuuuuacucaaacaucaugaacuuuuucaagacugaaauuacgcuggccaauggagaaaucaggaagaggccacugaucgaaacuaacggagaaacgggcgaaaucgugugggacaagggcagggacuucgcaacuguucgcaaagugcucucuaugccgcaagucaauauugugaagaaaaccgaagugcaaaccggcggauuuucaaaggaaucgauccucccaaagagaaauagcgacaagcucauugcacgcaagaaagacugggacccgaagaaguacggaggauucgauucgccgacugucgcauacuccguccucgugguggccaagguggagaagggaaagagcaaaaagcucaaauccgucaaagagcugcuggggauuaccaucauggaacgauccucguucgagaagaacccgauugauuuccucgaggcgaaggguuacaaggaggugaagaaggaucugaucaucaaacuccccaaguacucacuguucgaacuggaaaauggucggaagcgcaugcuggcuucggccggagaacuccaaaaaggaaaugagcuggccuugccuagcaaguacgucaacuuccucuaucuugcuucgcacuacgaaaaacucaaagggucaccggaagauaacgaacagaagcagcuuuucguggagcagcacaagcauuaucuggaugaaaucaucgaacaaaucuccgaguuuucaaagcgcgugauccucgccgacgccaaccucgacaaaguccugucggccuacaauaagcauagagauaagccgaucagagaacaggccgagaacauuauccacuuguucacccugacuaaccugggagccccagccgccuucaaguacuucgauacuacuaucgaucgcaaaagauacacguccaccaaggaaguucuggacgcgacccugauccaccaaagcaucacuggacucuacgaaacuaggaucgaucugucgcagcuggguggcgauggcgguggaucuccgaaaaagaagagaaagguguaauga

SEQ ID NO: 1106 - RNA, 4140 nt, Artificial Sequence
  Synthetic
auggacaagaaguacagcaucggacuggcaaucggaacaaacagcgucggaugggcagucaucacagacgaauacaaggucccgagcaagaaguucaagguccugggaaacacagacagacacagcaucaagaagaaccugaucggagcacugcuguucgacagcggagaaacagcagaagcaacaagacugaagagaacagcaagaagaagauacacaagaagaaagaacagaaucugcuaccugcaggaaaucuucagcaacgaaauggcaaaggucgacgacagcuucuuccacagacuggaagaaagcuuccuggucgaagaagacaagaagcacgaaagacacccgaucuucggaaacaucgucgacgaagucgcauaccacgaaaaguacccgacaaucuaccaccugagaaagaagcuggucgacagcacagacaaggcagaccugagacugaucuaccuggcacuggcacacaugaucaaguucagaggacacuuccugaucgaaggagaccugaacccggacaacagcgacgucgacaagcuguucauccagcugguccagacauacaaccagcuguucgaagaaaacccgaucaacgcaagcggagucgacgcaaaggcaauccugagcgcaagacugagcaagagcagaagacuggaaaaccugaucgcacagcugccgggagaaaagaagaacggacuguucggaaaccugaucgcacugagccugggacugacaccgaacuucaagagcaacuucgaccuggcagaagacgcaaagcugcagcugagcaaggacacauacgacgacgaccuggacaaccugcuggcacagaucggagaccaguacgcagaccuguuccuggcagcaaagaaccugagcgacgcaauccugcugagcgacauccugagagucaacacagaaaucacaaaggcaccgcugagcgcaagcaugaucaagagauacgacgaacaccaccaggaccugacacugcugaaggcacuggucagacagcagcugccggaaaaguacaaggaaaucuucuucgaccagagcaagaacggauacgcaggauacaucgacggaggagcaagccaggaagaauucuacaaguucaucaagccgauccuggaaaagauggacggaacagaagaacugcuggucaagcugaacagagaagaccugcugagaaagcagagaacauucgacaacggaagcaucccgcaccagauccaccugggagaacugcacgcaauccugagaagacaggaagacuucuacccguuccugaaggacaacagagaaaagaucgaaaagauccugacauucagaaucccguacuacgucggaccgcuggcaagaggaaacagcagauucgcauggaugacaagaaagagcgaagaaacaaucacaccguggaacuucgaagaagucgucgacaagggagcaagcgcacagagcuucaucgaaagaaugacaaacuucgacaagaaccugccgaacgaaaagguccugccgaagcacagccugcuguacgaauacuucacagucuacaacgaacugacaaaggucaaguacgucacagaaggaaugagaaagccggcauuccugagcggagaacagaagaaggcaaucgucgaccugcuguucaagacaaacagaaaggucacagucaagcagcugaaggaagacuacuucaagaagaucgaaugcuucgacagcgucgaaaucagcggagucgaagacagauucaacgcaagccugggaacauaccacgaccugcugaagaucaucaaggacaaggacuuccuggacaacgaagaaaacgaagacauccuggaagacaucguccugacacugacacuguucgaagacagagaaaugaucgaagaaagacugaagacauacgcacaccuguucgacgacaaggucaugaagcagcugaagagaagaagauacacaggauggggaagacugagcagaaagcugaucaacggaaucagagacaagcagagcggaaagacaauccuggacuuccugaagagcgacggauucgcaaacagaaacuucaugcagcugauccacgacgacagccugacauucaaggaagacauccagaaggcacaggucagcggacagggagacagccugcacgaacacaucgcaaaccuggcaggaagcccggcaaucaagaagggaauccugcagacagucaaggucgucgacgaacuggucaaggucaugggaagacacaagccggaaaacaucgucaucgaaauggcaagagaaaaccagacaacacagaagggacagaagaacagcagagaaagaaugaagagaaucgaagaaggaaucaaggaacugggaagccagauccugaaggaacacccggucgaaaacacacagcugcagaacgaaaagcuguaccuguacuaccugcagaacggaagagacauguacgucgaccaggaacuggacaucaacagacugagcgacuacgacgucgaccacaucgucccgcagagcuuccugaaggacgacagcaucgacaacaagguccugacaagaagcgacaagaacagaggaaagagcgacaacgucccgagcgaagaagucgucaagaagaugaagaacuacuggagacagcugcugaacgcaaagcugaucacacagagaaaguucgacaaccugacaaaggcagagagaggaggacugagcgaacuggacaaggcaggauucaucaagagacagcuggucgaaacaagacagaucacaaagcacgucgcacagauccuggacagcagaaugaacacaaaguacgacgaaaacgacaagcugaucagagaagucaaggucaucacacugaagagcaagcuggucagcgacuucagaaaggacuuccaguucuacaaggucagagaaaucaacaacuaccaccacgcacacgacgcauaccugaacgcagucgucggaacagcacugaucaagaaguacccgaagcuggaaagcgaauucgucuacggagacuacaaggucuacgacgucagaaagaugaucgcaaagagcgaacaggaaaucggaaaggcaacagcaaaguacuucuucuacagcaacaucaugaacuucuucaagacagaaaucacacuggcaaacggagaaaucagaaagagaccgcugaucgaaacaaacggagaaacaggagaaaucgucugggacaagggaagagacuucgcaacagucagaaagguccugagcaugccgcaggucaacaucgucaagaagacagaaguccagacaggaggauucagcaaggaaagcauccugccgaagagaaacagcgacaagcugaucgcaagaaagaaggacugggacccgaagaaguacggaggauucgacagcccgacagucgcauacagcguccuggucgucgcaaaggucgaaaagggaaagagcaagaagcugaagagcgucaaggaacugcugggaaucacaaucauggaaagaagcagcuucgaaaagaacccgaucgacuuccuggaagcaaagggauacaaggaagucaagaaggaccugaucaucaagcugccgaaguacagccuguucgaacuggaaaacggaagaaagagaaugcuggcaagcgcaggagaacugcagaagggaaacgaacuggcacugccgagcaaguacgucaacuuccuguaccuggcaagccacuacgaaaagcugaagggaagcccggaagacaacgaacagaagcagcuguucgucgaacagcacaagcacuaccuggacgaaaucaucgaacagaucagcgaauucagcaagagagucauccuggcagacgcaaaccuggacaagguccugagcgcauacaacaagcacagagacaagccgaucagagaacaggcagaaaacaucauccaccuguucacacugacaaaccugggagcaccggcagcauucaaguacuucgacacaacaaucgacagaaagagauacacaagcacaaaggaaguccuggacgcaacacugauccaccagagcaucacaggacuguacgaaacaagaaucgaccugagccagcugggaggagacggaggaggaagcccgaagaagaagagaaaggucuag

SEQ ID NO: 1107 - RNA, 4140 nt, Artificial Sequence
  Synthetic
auggacaagaaguacagcaucggacuggcaaucggaacaaacagcgucggaugggcagucaucacagacgaauacaaggucccgagcaagaaguucaagguccugggaaacacagacagacacagcaucaagaagaaccugaucggagcacugcuguucgacagcggagaaacagcagaagcaacaagacugaagagaacagcaagaagaagauacacaagaagaaagaacagaaucugcuaccugcaggaaaucuucagcaacgaaauggcaaaggucgacgacagcuucuuccacagacuggaagaaagcuuccuggucgaagaagacaagaagcacgaaagacacccgaucuucggaaacaucgucgacgaagucgcauaccacgaaaaguacccgacaaucuaccaccugagaaagaagcuggucgacagcacagacaaggcagaccugagacugaucuaccuggcacuggcacacaugaucaaguucagaggacacuuccugaucgaaggagaccugaacccggacaacagcgacgucgacaagcuguucauccagcugguccagacauacaaccagcuguucgaagaaaacccgaucaacgcaagcggagucgacgcaaaggcaauccugagcgcaagacugagcaagagcagaagacuggaaaaccugaucgcacagcugccgggagaaaagaagaacggacuguucggaaaccugaucgcacugagccugggacugacaccgaacuucaagagcaacuucgaccuggcagaagacgcaaagcugcagcugagcaaggacacauacgacgacgaccuggacaaccugcuggcacagaucggagaccaguacgcagaccuguuccuggcagcaaagaaccugagcgacgcaauccugcugagcgacauccugagagucaacacagaaaucacaaaggcaccgcugagcgcaagcaugaucaagagauacgacgaacaccaccaggaccugacacugcugaaggcacuggucagacagcagcugccggaaaaguacaaggaaaucuucuucgaccagagcaagaacggauacgcaggauacaucgacggaggagcaagccaggaagaauucuacaaguucaucaagccgauccuggaaaagauggacggaacagaagaacugcuggucaagcugaacagagaagaccugcugagaaagcagagaacauucgacaacggaagcaucccgcaccagauccaccugggagaacugcacgcaauccugagaagacaggaagacuucuacccguuccugaaggacaacagagaaaagaucgaaaagauccugacauucagaaucccguacuacgucggaccgcuggcaagaggaaacagcagauucgcauggaugacaagaaagagcgaagaaacaaucacaccguggaacuucgaagaagucgucgacaagggagcaagcgcacagagcuucaucgaaagaaugacaaacuucgacaagaaccugccgaacgaaaagguccugccgaagcacagccugcuguacgaauacuucacagucuacaacgaacugacaaaggucaaguacgucacagaaggaaugagaaagccggcauuccugagcggagaacagaagaaggcaaucgucgaccugcuguucaagacaaacagaaaggucacagucaagcagcugaaggaagacuacuucaagaagaucgaaugcuucgacagcgucgaaaucagcggagucgaagacagauucaacgcaagccugggaacauaccacgaccugcugaagaucaucaaggacaaggacuuccuggacaacgaagaaaacgaagacauccuggaagacaucguccugacacugacacuguucgaagacagagaaaugaucgaagaaagacugaagacauacgcacaccuguucgacgacaaggucaugaagcagcugaagagaagaagauacacaggauggggaagacugagcagaaagcugaucaacggaaucagagacaagcagagcggaaagacaauccuggacuuccugaagagcgacggauucgcaaacagaaacuucaugcagcugauccacgacgacagccugacauucaaggaagacauccagaaggcacaggucagcggacagggagacagccugcacgaacacaucgcaaaccuggcaggaagcccggcaaucaagaagggaauccugcagacagucaaggucgucgacgaacuggucaaggucaugggaagacacaagccggaaaacaucgucaucgaaauggcaagagaaaaccagacaacacagaagggacagaagaacagcagagaaagaaugaagagaaucgaagaaggaaucaaggaacugggaagccagauccugaaggaacacccggucgaaaacacacagcugcagaacgaaaagcuguaccuguacuaccugcagaacggaagagacauguacgucgaccaggaacuggacaucaacagacugagcgacuacgacgucgacgcaaucgucccgcagagcuuccugaaggacgacagcaucgacaacaagguccugacaagaagcgacaagaacagaggaaagagcgacaacgucccgagcgaagaagucgucaagaagaugaagaacuacuggagacagcugcugaacgcaaagcugaucacacagagaaaguucgacaaccugacaaaggcagagagaggaggacugagcgaacuggacaaggcaggauucaucaagagacagcuggucgaaacaagacagaucacaaagcacgucgcacagauccuggacagcagaaugaacacaaaguacgacgaaaacgacaagcugaucagagaagucaaggucaucacacugaagagcaagcuggucagcgacuucagaaaggacuuccaguucuacaaggucagagaaaucaacaacuaccaccacgcacacgacgcauaccugaacgcagucgucggaacagcacugaucaagaaguacccgaagcuggaaagcgaauucgucuacggagacuacaaggucuacgacgucagaaagaugaucgcaaagagcgaacaggaaaucggaaaggcaacagcaaaguacuucuucuacagcaacaucaugaacuucuucaagacagaaaucacacuggcaaacggagaaaucagaaagagaccgcugaucgaaacaaacggagaaacaggagaaaucgucugggacaagggaagagacuucgcaacagucagaaagguccugagcaugccgcaggucaacaucgucaagaagacagaaguccagacaggaggauucagcaaggaaagcauccugccgaagagaaacagcgacaagcugaucgcaagaaagaaggacugggacccgaagaaguacggaggauucgacagcccgacagucgcauacagcguccuggucgucgcaaaggucgaaaagggaaagagcaagaagcugaagagcgucaaggaacugcugggaaucacaaucauggaaagaagcagcuucgaaaagaacccgaucgacuuccuggaagcaaagggauacaaggaagucaagaaggaccugaucaucaagcugccgaaguacagccuguucgaacuggaaaacggaagaaagagaaugcuggcaagcgcaggagaacugcagaagggaaacgaacuggcacugccgagcaaguacgucaacuuccuguaccuggcaagccacuacgaaaagcugaagggaagcccggaagacaacgaacagaagcagcuguucgucgaacagcacaagcacuaccuggacgaaaucaucgaacagaucagcgaauucagcaagagagucauccuggcagacgcaaaccuggacaagguccugagcgcauacaacaagcacagagacaagccgaucagagaacaggcagaaaacaucauccaccuguucacacugacaaaccugggagcaccggcagcauucaaguacuucgacacaacaaucgacagaaagagauacacaagcacaaaggaaguccuggacgcaacacugauccaccagagcaucacaggacuguacgaaacaagaaucgaccugagccagcugggaggagacggaggaggaagcccgaagaagaagagaaaggucuag

SEQ ID NO: 1108 - RNA, 4134 nt, Artificial Sequence
  Synthetic
gacaagaaguacagcaucggacuggacaucggaacaaacagcgucggaugggcagucaucacagacgaauacaaggucccgagcaagaaguucaagguccugggaaacacagacagacacagcaucaagaagaaccugaucggagcacugcuguucgacagcggagaaacagcagaagcaacaagacugaagagaacagcaagaagaagauacacaagaagaaagaacagaaucugcuaccugcaggaaaucuucagcaacgaaauggcaaaggucgacgacagcuucuuccacagacuggaagaaagcuuccuggucgaagaagacaagaagcacgaaagacacccgaucuucggaaacaucgucgacgaagucgcauaccacgaaaaguacccgacaaucuaccaccugagaaagaagcuggucgacagcacagacaaggcagaccugagacugaucuaccuggcacuggcacacaugaucaaguucagaggacacuuccugaucgaaggagaccugaacccggacaacagcgacgucgacaagcuguucauccagcugguccagacauacaaccagcuguucgaagaaaacccgaucaacgcaagcggagucgacgcaaaggcaauccugagcgcaagacugagcaagagcagaagacuggaaaaccugaucgcacagcugccgggagaaaagaagaacggacuguucggaaaccugaucgcacugagccugggacugacaccgaacuucaagagcaacuucgaccuggcagaagacgcaaagcugcagcugagcaaggacacauacgacgacgaccuggacaaccugcuggcacagaucggagaccaguacgcagaccuguuccuggcagcaaagaaccugagcgacgcaauccugcugagcgacauccugagagucaacacagaaaucacaaaggcaccgcugagcgcaagcaugaucaagagauacgacgaacaccaccaggaccugacacugcugaaggcacuggucagacagcagcugccggaaaaguacaaggaaaucuucuucgaccagagcaagaacggauacgcaggauacaucgacggaggagcaagccaggaagaauucuacaaguucaucaagccgauccuggaaaagauggacggaacagaagaacugcuggucaagcugaacagagaagaccugcugagaaagcagagaacauucgacaacggaagcaucccgcaccagauccaccugggagaacugcacgcaauccugagaagacaggaagacuucuacccguuccugaaggacaacagagaaaagaucgaaaagauccugacauucagaaucccguacuacgucggaccgcuggcaagaggaaacagcagauucgcauggaugacaagaaagagcgaagaaacaaucacaccguggaacuucgaagaagucgucgacaagggagcaagcgcacagagcuucaucgaaagaaugacaaacuucgacaagaaccugccgaacgaaaagguccugccgaagcacagccugcuguacgaauacuucacagucuacaacgaacugacaaaggucaaguacgucacagaaggaaugagaaagccggcauuccugagcggagaacagaagaaggcaaucgucgaccugcuguucaagacaaacagaaaggucacagucaagcagcugaaggaagacuacuucaagaagaucgaaugcuucgacagcgucgaaaucagcggagucgaagacagauucaacgcaagccugggaacauaccacgaccugcugaagaucaucaaggacaaggacuuccuggacaacgaagaaaacgaagacauccuggaagacaucguccugacacugacacuguucgaagacagagaaaugaucgaagaaagacugaagacauacgcacaccuguucgacgacaaggucaugaagcagcugaagagaagaagauacacaggauggggaagacugagcagaaagcugaucaacggaaucagagacaagcagagcggaaagacaauccuggacuuccugaagagcgacggauucgcaaacagaaacuucaugcagcugauccacgacgacagccugacauucaaggaagacauccagaaggcacaggucagcggacagggagacagccugcacgaacacaucgcaaaccuggcaggaagcccggcaaucaagaagggaauccugcagacagucaaggucgucgacgaacuggucaaggucaugggaagacacaagccggaaaacaucgucaucgaaauggcaagagaaaaccagacaacacagaagggacagaagaacagcagagaaagaaugaagagaaucgaagaaggaaucaaggaacugggaagccagauccugaaggaacacccggucgaaaacacacagcugcagaacgaaaagcuguaccuguacuaccugcagaacggaagagacauguacgucgaccaggaacuggacaucaacagacugagcgacuacgacgucgaccacaucgucccgcagagcuuccugaaggacgacagcaucgacaacaagguccugacaagaagcgacaagaacagaggaaagagcgacaacgucccgagcgaagaagucgucaagaagaugaagaacuacuggagacagcugcugaacgcaaagcugaucacacagagaaaguucgacaaccugacaaaggcagagagaggaggacugagcgaacuggacaaggcaggauucaucaagagacagcuggucgaaacaagacagaucacaaagcacgucgcacagauccuggacagcagaaugaacacaaaguacgacgaaaacgacaagcugaucagagaagucaaggucaucacacugaagagcaagcuggucagcgacuucagaaaggacuuccaguucuacaaggucagagaaaucaacaacuaccaccacgcacacgacgcauaccugaacgcagucgucggaacagcacugaucaagaaguacccgaagcuggaaagcgaauucgucuacggagacuacaaggucuacgacgucagaaagaugaucgcaaagagcgaacaggaaaucggaaaggcaacagcaaaguacuucuucuacagcaacaucaugaacuucuucaagacagaaaucacacuggcaaacggagaaaucagaaagagaccgcugaucgaaacaaacggagaaacaggagaaaucgucugggacaagggaagagacuucgcaacagucagaaagguccugagcaugccgcaggucaacaucgucaagaagacagaaguccagacaggaggauucagcaaggaaagcauccugccgaagagaaacagcgacaagcugaucgcaagaaagaaggacugggacccgaagaaguacggaggauucgacagcccgacagucgcauacagcguccuggucgucgcaaaggucgaaaagggaaagagcaagaagcugaagagcgucaaggaacugcugggaaucacaaucauggaaagaagcagcuucgaaaagaacccgaucgacuuccuggaagcaaagggauacaaggaagucaagaaggaccugaucaucaagcugccgaaguacagccuguucgaacuggaaaacggaagaaagagaaugcuggcaagcgcaggagaacugcagaagggaaacgaacuggcacugccgagcaaguacgucaacuuccuguaccuggcaagccacuacgaaaagcugaagggaagcccggaagacaacgaacagaagcagcuguucgucgaacagcacaagcacuaccuggacgaaaucaucgaacagaucagcgaauucagcaagagagucauccuggcagacgcaaaccuggacaagguccugagcgcauacaacaagcacagagacaagccgaucagagaacaggcagaaaacaucauccaccuguucacacugacaaaccugggagcaccggcagcauucaaguacuucgacacaacaaucgacagaaagagauacacaagcacaaaggaaguccuggacgcaacacugauccaccagagcaucacaggacuguacgaaacaagaaucgaccugagccagcugggaggagacggaggaggaagcccgaagaagaagagaaagguc

SEQ ID NO: 1109 - RNA, 4134 nt, Artificial Sequence
  Synthetic
gacaagaaguacagcaucggacuggcaaucggaacaaacagcgucggaugggcagucaucacagacgaauacaaggucccgagcaagaaguucaagguccugggaaacacagacagacacagcaucaagaagaaccugaucggagcacugcuguucgacagcggagaaacagcagaagcaacaagacugaagagaacagcaagaagaagauacacaagaagaaagaacagaaucugcuaccugcaggaaaucuucagcaacgaaauggcaaaggucgacgacagcuucuuccacagacuggaagaaagcuuccuggucgaagaagacaagaagcacgaaagacacccgaucuucggaaacaucgucgacgaagucgcauaccacgaaaaguacccgacaaucuaccaccugagaaagaagcuggucgacagcacagacaaggcagaccugagacugaucuaccuggcacuggcacacaugaucaaguucagaggacacuuccugaucgaaggagaccugaacccggacaacagcgacgucgacaagcuguucauccagcugguccagacauacaaccagcuguucgaagaaaacccgaucaacgcaagcggagucgacgcaaaggcaauccugagcgcaagacugagcaagagcagaagacuggaaaaccugaucgcacagcugccgggagaaaagaagaacggacuguucggaaaccugaucgcacugagccugggacugacaccgaacuucaagagcaacuucgaccuggcagaagacgcaaagcugcagcugagcaaggacacauacgacgacgaccuggacaaccugcuggcacagaucggagaccaguacgcagaccuguuccuggcagcaaagaaccugagcgacgcaauccugcugagcgacauccugagagucaacacagaaaucacaaaggcaccgcugagcgcaagcaugaucaagagauacgacgaacaccaccaggaccugacacugcugaaggcacuggucagacagcagcugccggaaaaguacaaggaaaucuucuucgaccagagcaagaacggauacgcaggauacaucgacggaggagcaagccaggaagaauucuacaaguucaucaagccgauccuggaaaagauggacggaacagaagaacugcuggucaagcugaacagagaagaccugcugagaaagcagagaacauucgacaacggaagcaucccgcaccagauccaccugggagaacugcacgcaauccugagaagacaggaagacuucuacccguuccugaaggacaacagagaaaagaucgaaaagauccugacauucagaaucccguacuacgucggaccgcuggcaagaggaaacagcagauucgcauggaugacaagaaagagcgaagaaacaaucacaccguggaacuucgaagaagucgucgacaagggagcaagcgcacagagcuucaucgaaagaaugacaaacuucgacaagaaccugccgaacgaaaagguccugccgaagcacagccugcuguacgaauacuucacagucuacaacgaacugacaaaggucaaguacgucacagaaggaaugagaaagccggcauuccugagcggagaacagaagaaggcaaucgucgaccugcuguucaagacaaacagaaaggucacagucaagcagcugaaggaagacuacuucaagaagaucgaaugcuucgacagcgucgaaaucagcggagucgaagacagauucaacgcaagccugggaacauaccacgaccugcugaagaucaucaaggacaaggacuuccuggacaacgaagaaaacgaagacauccuggaagacaucguccugacacugacacuguucgaagacagagaaaugaucgaagaaagacugaagacauacgcacaccuguucgacgacaaggucaugaagcagcugaagagaagaagauacacaggauggggaagacugagcagaaagcugaucaacggaaucagagacaagcagagcggaaagacaauccuggacuuccugaagagcgacggauucgcaaacagaaacuucaugcagcugauccacgacgacagccugacauucaaggaagacauccagaaggcacaggucagcggacagggagacagccugcacgaacacaucgcaaaccuggcaggaagcccggcaaucaagaagggaauccugcagacagucaaggucgucgacgaacuggucaaggucaugggaagacacaagccggaaaacaucgucaucgaaauggcaagagaaaaccagacaacacagaagggacagaagaacagcagagaaagaaugaagagaaucgaagaaggaaucaaggaacugggaagccagauccugaaggaacacccggucgaaaacacacagcugcagaacgaaaagcuguaccuguacuaccugcagaacggaagagacauguacgucgaccaggaacuggacaucaacagacugagcgacuacgacgucgaccacaucgucccgcagagcuuccugaaggacgacagcaucgacaacaagguccugacaagaagcgacaagaacagaggaaagagcgacaacgucccgagcgaagaagucgucaagaagaugaagaacuacuggagacagcugcugaacgcaaagcugaucacacagagaaaguucgacaaccugacaaaggcagagagaggaggacugagcgaacuggacaaggcaggauucaucaagagacagcuggucgaaacaagacagaucacaaagcacgucgcacagauccuggacagcagaaugaacacaaaguacgacgaaaacgacaagcugaucagagaagucaaggucaucacacugaagagcaagcuggucagcgacuucagaaaggacuuccaguucuacaaggucagagaaaucaacaacuaccaccacgcacacgacgcauaccugaacgcagucgucggaacagcacugaucaagaaguacccgaagcuggaaagcgaauucgucuacggagacuacaaggucuacgacgucagaaagaugaucgcaaagagcgaacaggaaaucggaaaggcaacagcaaaguacuucuucuacagcaacaucaugaacuucuucaagacagaaaucacacuggcaaacggagaaaucagaaagagaccgcugaucgaaacaaacggagaaacaggagaaaucgucugggacaagggaagagacuucgcaacagucagaaagguccugagcaugccgcaggucaacaucgucaagaagacagaaguccagacaggaggauucagcaaggaaagcauccugccgaagagaaacagcgacaagcugaucgcaagaaagaaggacugggacccgaagaaguacggaggauucgacagcccgacagucgcauacagcguccuggucgucgcaaaggucgaaaagggaaagagcaagaagcugaagagcgucaaggaacugcugggaaucacaaucauggaaagaagcagcuucgaaaagaacccgaucgacuuccuggaagcaaagggauacaaggaagucaagaaggaccugaucaucaagcugccgaaguacagccuguucgaacuggaaaacggaagaaagagaaugcuggcaagcgcaggagaacugcagaagggaaacgaacuggcacugccgagcaaguacgucaacuuccuguaccuggcaagccacuacgaaaagcugaagggaagcccggaagacaacgaacagaagcagcuguucgucgaacagcacaagcacuaccuggacgaaaucaucgaacagaucagcgaauucagcaagagagucauccuggcagacgcaaaccuggacaagguccugagcgcauacaacaagcacagagacaagccgaucagagaacaggcagaaaacaucauccaccuguucacacugacaaaccugggagcaccggcagcauucaaguacuucgacacaacaaucgacagaaagagauacacaagcacaaaggaaguccuggacgcaacacugauccaccagagcaucacaggacuguacgaaacaagaaucgaccugagccagcugggaggagacggaggaggaagcccgaagaagaagagaaagguc

SEQ ID NO: 1110 - RNA, 4134 nt, Artificial Sequence
  Synthetic
gacaagaaguacagcaucggacuggcaaucggaacaaacagcgucggaugggcagucaucacagacgaauacaaggucccgagcaagaaguucaagguccugggaaacacagacagacacagcaucaagaagaaccugaucggagcacugcuguucgacagcggagaaacagcagaagcaacaagacugaagagaacagcaagaagaagauacacaagaagaaagaacagaaucugcuaccugcaggaaaucuucagcaacgaaauggcaaaggucgacgacagcuucuuccacagacuggaagaaagcuuccuggucgaagaagacaagaagcacgaaagacacccgaucuucggaaacaucgucgacgaagucgcauaccacgaaaaguacccgacaaucuaccaccugagaaagaagcuggucgacagcacagacaaggcagaccugagacugaucuaccuggcacuggcacacaugaucaaguucagaggacacuuccugaucgaaggagaccugaacccggacaacagcgacgucgacaagcuguucauccagcugguccagacauacaaccagcuguucgaagaaaacccgaucaacgcaagcggagucgacgcaaaggcaauccugagcgcaagacugagcaagagcagaagacuggaaaaccugaucgcacagcugccgggagaaaagaagaacggacuguucggaaaccugaucgcacugagccugggacugacaccgaacuucaagagcaacuucgaccuggcagaagacgcaaagcugcagcugagcaaggacacauacgacgacgaccuggacaaccugcuggcacagaucggagaccaguacgcagaccuguuccuggcagcaaagaaccugagcgacgcaauccugcugagcgacauccugagagucaacacagaaaucacaaaggcaccgcugagcgcaagcaugaucaagagauacgacgaacaccaccaggaccugacacugcugaaggcacuggucagacagcagcugccggaaaaguacaaggaaaucuucuucgaccagagcaagaacggauacgcaggauacaucgacggaggagcaagccaggaagaauucuacaaguucaucaagccgauccuggaaaagauggacggaacagaagaacugcuggucaagcugaacagagaagaccugcugagaaagcagagaacauucgacaacggaagcaucccgcaccagauccaccugggagaacugcacgcaauccugagaagacaggaagacuucuacccguuccugaaggacaacagagaaaagaucgaaaagauccugacauucagaaucccguacuacgucggaccgcuggcaagaggaaacagcagauucgcauggaugacaagaaagagcgaagaaacaaucacaccguggaacuucgaagaagucgucgacaagggagcaagcgcacagagcuucaucgaaagaaugacaaacuucgacaagaaccugccgaacgaaaagguccugccgaagcacagccugcuguacgaauacuucacagucuacaacgaacugacaaaggucaaguacgucacagaaggaaugagaaagccggcauuccugagcggagaacagaagaaggcaaucgucgaccugcuguucaagacaaacagaaaggucacagucaagcagcugaaggaagacuacuucaagaagaucgaaugcuucgacagcgucgaaaucagcggagucgaagacagauucaacgcaagccugggaacauaccacgaccugcugaagaucaucaaggacaaggacuuccuggacaacgaagaaaacgaagacauccuggaagacaucguccugacacugacacuguucgaagacagagaaaugaucgaagaaagacugaagacauacgcacaccuguucgacgacaaggucaugaagcagcugaagagaagaagauacacaggauggggaagacugagcagaaagcugaucaacggaaucagagacaagcagagcggaaagacaauccuggacuuccugaagagcgacggauucgcaaacagaaacuucaugcagcugauccacgacgacagccugacauucaaggaagacauccagaaggcacaggucagcggacagggagacagccugcacgaacacaucgcaaaccuggcaggaagcccggcaaucaagaagggaauccugcagacagucaaggucgucgacgaacuggucaaggucaugggaagacacaagccggaaaacaucgucaucgaaauggcaagagaaaaccagacaacacagaagggacagaagaacagcagagaaagaaugaagagaaucgaagaaggaaucaaggaacugggaagccagauccugaaggaacacccggucgaaaacacacagcugcagaacgaaaagcuguaccuguacuaccugcagaacggaagagacauguacgucgaccaggaacuggacaucaacagacugagcgacuacgacgucgacgcaaucgucccgcagagcuuccugaaggacgacagcaucgacaacaagguccugacaagaagcgacaagaacagaggaaagagcgacaacgucccgagcgaagaagucgucaagaagaugaagaacuacuggagacagcugcugaacgcaaagcugaucacacagagaaaguucgacaaccugacaaaggcagagagaggaggacugagcgaacuggacaaggcaggauucaucaagagacagcuggucgaaacaagacagaucacaaagcacgucgcacagauccuggacagcagaaugaacacaaaguacgacgaaaacgacaagcugaucagagaagucaaggucaucacacugaagagcaagcuggucagcgacuucagaaaggacuuccaguucuacaaggucagagaaaucaacaacuaccaccacgcacacgacgcauaccugaacgcagucgucggaacagcacugaucaagaaguacccgaagcuggaaagcgaauucgucuacggagacuacaaggucuacgacgucagaaagaugaucgcaaagagcgaacaggaaaucggaaaggcaacagcaaaguacuucuucuacagcaacaucaugaacuucuucaagacagaaaucacacuggcaaacggagaaaucagaaagagaccgcugaucgaaacaaacggagaaacaggagaaaucgucugggacaagggaagagacuucgcaacagucagaaagguccugagcaugccgcaggucaacaucgucaagaagacagaaguccagacaggaggauucagcaaggaaagcauccugccgaagagaaacagcgacaagcugaucgcaagaaagaaggacugggacccgaagaaguacggaggauucgacagcccgacagucgcauacagcguccuggucgucgcaaaggucgaaaagggaaagagcaagaagcugaagagcgucaaggaacugcugggaaucacaaucauggaaagaagcagcuucgaaaagaacccgaucgacuuccuggaagcaaagggauacaaggaagucaagaaggaccugaucaucaagcugccgaaguacagccuguucgaacuggaaaacggaagaaagagaaugcuggcaagcgcaggagaacugcagaagggaaacgaacuggcacugccgagcaaguacgucaacuuccuguaccuggcaagccacuacgaaaagcugaagggaagcccggaagacaacgaacagaagcagcuguucgucgaacagcacaagcacuaccuggacgaaaucaucgaacagaucagcgaauucagcaagagagucauccuggcagacgcaaaccuggacaagguccugagcgcauacaacaagcacagagacaagccgaucagagaacaggcagaaaacaucauccaccuguucacacugacaaaccugggagcaccggcagcauucaaguacuucgacacaacaaucgacagaaagagauacacaagcacaaaggaaguccuggacgcaacacugauccaccagagcaucacaggacuguacgaaacaagaaucgaccugagccagcugggaggagacggaggaggaagcccgaagaagaagagaaagguc

SEQ ID NO: 1111 - RNA, 4107 nt, Artificial Sequence
  Synthetic
auggacaagaaguacagcaucggacuggacaucggaacaaacagcgucggaugggcagucaucacagacgaauacaaggucccgagcaagaaguucaagguccugggaaacacagacagacacagcaucaagaagaaccugaucggagcacugcuguucgacagcggagaaacagcagaagcaacaagacugaagagaacagcaagaagaagauacacaagaagaaagaacagaaucugcuaccugcaggaaaucuucagcaacgaaauggcaaaggucgacgacagcuucuuccacagacuggaagaaagcuuccuggucgaagaagacaagaagcacgaaagacacccgaucuucggaaacaucgucgacgaagucgcauaccacgaaaaguacccgacaaucuaccaccugagaaagaagcuggucgacagcacagacaaggcagaccugagacugaucuaccuggcacuggcacacaugaucaaguucagaggacacuuccugaucgaaggagaccugaacccggacaacagcgacgucgacaagcuguucauccagcugguccagacauacaaccagcuguucgaagaaaacccgaucaacgcaagcggagucgacgcaaaggcaauccugagcgcaagacugagcaagagcagaagacuggaaaaccugaucgcacagcugccgggagaaaagaagaacggacuguucggaaaccugaucgcacugagccugggacugacaccgaacuucaagagcaacuucgaccuggcagaagacgcaaagcugcagcugagcaaggacacauacgacgacgaccuggacaaccugcuggcacagaucggagaccaguacgcagaccuguuccuggcagcaaagaaccugagcgacgcaauccugcugagcgacauccugagagucaacacagaaaucacaaaggcaccgcugagcgcaagcaugaucaagagauacgacgaacaccaccaggaccugacacugcugaaggcacuggucagacagcagcugccggaaaaguacaaggaaaucuucuucgaccagagcaagaacggauacgcaggauacaucgacggaggagcaagccaggaagaauucuacaaguucaucaagccgauccuggaaaagauggacggaacagaagaacugcuggucaagcugaacagagaagaccugcugagaaagcagagaacauucgacaacggaagcaucccgcaccagauccaccugggagaacugcacgcaauccugagaagacaggaagacuucuacccguuccugaaggacaacagagaaaagaucgaaaagauccugacauucagaaucccguacuacgucggaccgcuggcaagaggaaacagcagauucgcauggaugacaagaaagagcgaagaaacaaucacaccguggaacuucgaagaagucgucgacaagggagcaagcgcacagagcuucaucgaaagaaugacaaacuucgacaagaaccugccgaacgaaaagguccugccgaagcacagccugcuguacgaauacuucacagucuacaacgaacugacaaaggucaaguacgucacagaaggaaugagaaagccggcauuccugagcggagaacagaagaaggcaaucgucgaccugcuguucaagacaaacagaaaggucacagucaagcagcugaaggaagacuacuucaagaagaucgaaugcuucgacagcgucgaaaucagcggagucgaagacagauucaacgcaagccugggaacauaccacgaccugcugaagaucaucaaggacaaggacuuccuggacaacgaagaaaacgaagacauccuggaagacaucguccugacacugacacuguucgaagacagagaaaugaucgaagaaagacugaagacauacgcacaccuguucgacgacaaggucaugaagcagcugaagagaagaagauacacaggauggggaagacugagcagaaagcugaucaacggaaucagagacaagcagagcggaaagacaauccuggacuuccugaagagcgacggauucgcaaacagaaacuucaugcagcugauccacgacgacagccugacauucaaggaagacauccagaaggcacaggucagcggacagggagacagccugcacgaacacaucgcaaaccuggcaggaagcccggcaaucaagaagggaauccugcagacagucaaggucgucgacgaacuggucaaggucaugggaagacacaagccggaaaacaucgucaucgaaauggcaagagaaaaccagacaacacagaagggacagaagaacagcagagaaagaaugaagagaaucgaagaaggaaucaaggaacugggaagccagauccugaaggaacacccggucgaaaacacacagcugcagaacgaaaagcuguaccuguacuaccugcagaacggaagagacauguacgucgaccaggaacuggacaucaacagacugagcgacuacgacgucgaccacaucgucccgcagagcuuccugaaggacgacagcaucgacaacaagguccugacaagaagcgacaagaacagaggaaagagcgacaacgucccgagcgaagaagucgucaagaagaugaagaacuacuggagacagcugcugaacgcaaagcugaucacacagagaaaguucgacaaccugacaaaggcagagagaggaggacugagcgaacuggacaaggcaggauucaucaagagacagcuggucgaaacaagacagaucacaaagcacgucgcacagauccuggacagcagaaugaacacaaaguacgacgaaaacgacaagcugaucagagaagucaaggucaucacacugaagagcaagcuggucagcgacuucagaaaggacuuccaguucuacaaggucagagaaaucaacaacuaccaccacgcacacgacgcauaccugaacgcagucgucggaacagcacugaucaagaaguacccgaagcuggaaagcgaauucgucuacggagacuacaaggucuacgacgucagaaagaugaucgcaaagagcgaacaggaaaucggaaaggcaacagcaaaguacuucuucuacagcaacaucaugaacuucuucaagacagaaaucacacuggcaaacggagaaaucagaaagagaccgcugaucgaaacaaacggagaaacaggagaaaucgucugggacaagggaagagacuucgcaacagucagaaagguccugagcaugccgcaggucaacaucgucaagaagacagaaguccagacaggaggauucagcaaggaaagcauccugccgaagagaaacagcgacaagcugaucgcaagaaagaaggacugggacccgaagaaguacggaggauucgacagcccgacagucgcauacagcguccuggucgucgcaaaggucgaaaagggaaagagcaagaagcugaagagcgucaaggaacugcugggaaucacaaucauggaaagaagcagcuucgaaaagaacccgaucgacuuccuggaagcaaagggauacaaggaagucaagaaggaccugaucaucaagcugccgaaguacagccuguucgaacuggaaaacggaagaaagagaaugcuggcaagcgcaggagaacugcagaagggaaacgaacuggcacugccgagcaaguacgucaacuuccuguaccuggcaagccacuacgaaaagcugaagggaagcccggaagacaacgaacagaagcagcuguucgucgaacagcacaagcacuaccuggacgaaaucaucgaacagaucagcgaauucagcaagagagucauccuggcagacgcaaaccuggacaagguccugagcgcauacaacaagcacagagacaagccgaucagagaacaggcagaaaacaucauccaccuguucacacugacaaaccugggagcaccggcagcauucaaguacuucgacacaacaaucgacagaaagagauacacaagcacaaaggaaguccuggacgcaacacugauccaccagagcaucacaggacuguacgaaacaagaaucgaccugagccagcugggaggagacuag

SEQ ID NO: 1112 - RNA, 4101 nt, Artificial Sequence
  Synthetic
gacaagaaguacagcaucggacuggacaucggaacaaacagcgucggaugggcagucaucacagacgaauacaaggucccgagcaagaaguucaagguccugggaaacacagacagacacagcaucaagaagaaccugaucggagcacugcuguucgacagcggagaaacagcagaagcaacaagacugaagagaacagcaagaagaagauacacaagaagaaagaacagaaucugcuaccugcaggaaaucuucagcaacgaaauggcaaaggucgacgacagcuucuuccacagacuggaagaaagcuuccuggucgaagaagacaagaagcacgaaagacacccgaucuucggaaacaucgucgacgaagucgcauaccacgaaaaguacccgacaaucuaccaccugagaaagaagcuggucgacagcacagacaaggcagaccugagacugaucuaccuggcacuggcacacaugaucaaguucagaggacacuuccugaucgaaggagaccugaacccggacaacagcgacgucgacaagcuguucauccagcugguccagacauacaaccagcuguucgaagaaaacccgaucaacgcaagcggagucgacgcaaaggcaauccugagcgcaagacugagcaagagcagaagacuggaaaaccugaucgcacagcugccgggagaaaagaagaacggacuguucggaaaccugaucgcacugagccugggacugacaccgaacuucaagagcaacuucgaccuggcagaagacgcaaagcugcagcugagcaaggacacauacgacgacgaccuggacaaccugcuggcacagaucggagaccaguacgcagaccuguuccuggcagcaaagaaccugagcgacgcaauccugcugagcgacauccugagagucaacacagaaaucacaaaggcaccgcugagcgcaagcaugaucaagagauacgacgaacaccaccaggaccugacacugcugaaggcacuggucagacagcagcugccggaaaaguacaaggaaaucuucuucgaccagagcaagaacggauacgcaggauacaucgacggaggagcaagccaggaagaauucuacaaguucaucaagccgauccuggaaaagauggacggaacagaagaacugcuggucaagcugaacagagaagaccugcugagaaagcagagaacauucgacaacggaagcaucccgcaccagauccaccugggagaacugcacgcaauccugagaagacaggaagacuucuacccguuccugaaggacaacagagaaaagaucgaaaagauccugacauucagaaucccguacuacgucggaccgcuggcaagaggaaacagcagauucgcauggaugacaagaaagagcgaagaaacaaucacaccguggaacuucgaagaagucgucgacaagggagcaagcgcacagagcuucaucgaaagaaugacaaacuucgacaagaaccugccgaacgaaaagguccugccgaagcacagccugcuguacgaauacuucacagucuacaacgaacugacaaaggucaaguacgucacagaaggaaugagaaagccggcauuccugagcggagaacagaagaaggcaaucgucgaccugcuguucaagacaaacagaaaggucacagucaagcagcugaaggaagacuacuucaagaagaucgaaugcuucgacagcgucgaaaucagcggagucgaagacagauucaacgcaagccugggaacauaccacgaccugcugaagaucaucaaggacaaggacuuccuggacaacgaagaaaacgaagacauccuggaagacaucguccugacacugacacuguucgaagacagagaaaugaucgaagaaagacugaagacauacgcacaccuguucgacgacaaggucaugaagcagcugaagagaagaagauacacaggauggggaagacugagcagaaagcugaucaacggaaucagagacaagcagagcggaaagacaauccuggacuuccugaagagcgacggauucgcaaacagaaacuucaugcagcugauccacgacgacagccugacauucaaggaagacauccagaaggcacaggucagcggacagggagacagccugcacgaacacaucgcaaaccuggcaggaagcccggcaaucaagaagggaauccugcagacagucaaggucgucgacgaacuggucaaggucaugggaagacacaagccggaaaacaucgucaucgaaauggcaagagaaaaccagacaacacagaagggacagaagaacagcagagaaagaaugaagagaaucgaagaaggaaucaaggaacugggaagccagauccugaaggaacacccggucgaaaacacacagcugcagaacgaaaagcuguaccuguacuaccugcagaacggaagagacauguacgucgaccaggaacuggacaucaacagacugagcgacuacgacgucgaccacaucgucccgcagagcuuccugaaggacgacagcaucgacaacaagguccugacaagaagcgacaagaacagaggaaagagcgacaacgucccgagcgaagaagucgucaagaagaugaagaacuacuggagacagcugcugaacgcaaagcugaucacacagagaaaguucgacaaccugacaaaggcagagagaggaggacugagcgaacuggacaaggcaggauucaucaagagacagcuggucgaaacaagacagaucacaaagcacgucgcacagauccuggacagcagaaugaacacaaaguacgacgaaaacgacaagcugaucagagaagucaaggucaucacacugaagagcaagcuggucagcgacuucagaaaggacuuccaguucuacaaggucagagaaaucaacaacuaccaccacgcacacgacgcauaccugaacgcagucgucggaacagcacugaucaagaaguacccgaagcuggaaagcgaauucgucuacggagacuacaaggucuacgacgucagaaagaugaucgcaaagagcgaacaggaaaucggaaaggcaacagcaaaguacuucuucuacagcaacaucaugaacuucuucaagacagaaaucacacuggcaaacggagaaaucagaaagagaccgcugaucgaaacaaacggagaaacaggagaaaucgucugggacaagggaagagacuucgcaacagucagaaagguccugagcaugccgcaggucaacaucgucaagaagacagaaguccagacaggaggauucagcaaggaaagcauccugccgaagagaaacagcgacaagcugaucgcaagaaagaaggacugggacccgaagaaguacggaggauucgacagcccgacagucgcauacagcguccuggucgucgcaaaggucgaaaagggaaagagcaagaagcugaagagcgucaaggaacugcugggaaucacaaucauggaaagaagcagcuucgaaaagaacccgaucgacuuccuggaagcaaagggauacaaggaagucaagaaggaccugaucaucaagcugccgaaguacagccuguucgaacuggaaaacggaagaaagagaaugcuggcaagcgcaggagaacugcagaagggaaacgaacuggcacugccgagcaaguacgucaacuuccuguaccuggcaagccacuacgaaaagcugaagggaagcccggaagacaacgaacagaagcagcuguucgucgaacagcacaagcacuaccuggacgaaaucaucgaacagaucagcgaauucagcaagagagucauccuggcagacgcaaaccuggacaagguccugagcgcauacaacaagcacagagacaagccgaucagagaacaggcagaaaacaucauccaccuguucacacugacaaaccugggagcaccggcagcauucaaguacuucgacacaacaaucgacagaaagagauacacaagcacaaaggaaguccuggacgcaacacugauccaccagagcaucacaggacuguacgaaacaagaaucgaccugagccagcugggaggagac

SEQ ID NO: 1113 - RNA, 4107 nt, Artificial Sequence
  Synthetic
auggacaagaaguacagcaucggacuggcaaucggaacaaacagcgucggaugggcagucaucacagacgaauacaaggucccgagcaagaaguucaagguccugggaaacacagacagacacagcaucaagaagaaccugaucggagcacugcuguucgacagcggagaaacagcagaagcaacaagacugaagagaacagcaagaagaagauacacaagaagaaagaacagaaucugcuaccugcaggaaaucuucagcaacgaaauggcaaaggucgacgacagcuucuuccacagacuggaagaaagcuuccuggucgaagaagacaagaagcacgaaagacacccgaucuucggaaacaucgucgacgaagucgcauaccacgaaaaguacccgacaaucuaccaccugagaaagaagcuggucgacagcacagacaaggcagaccugagacugaucuaccuggcacuggcacacaugaucaaguucagaggacacuuccugaucgaaggagaccugaacccggacaacagcgacgucgacaagcuguucauccagcugguccagacauacaaccagcuguucgaagaaaacccgaucaacgcaagcggagucgacgcaaaggcaauccugagcgcaagacugagcaagagcagaagacuggaaaaccugaucgcacagcugccgggagaaaagaagaacggacuguucggaaaccugaucgcacugagccugggacugacaccgaacuucaagagcaacuucgaccuggcagaagacgcaaagcugcagcugagcaaggacacauacgacgacgaccuggacaaccugcuggcacagaucggagaccaguacgcagaccuguuccuggcagcaaagaaccugagcgacgcaauccugcugagcgacauccugagagucaacacagaaaucacaaaggcaccgcugagcgcaagcaugaucaagagauacgacgaacaccaccaggaccugacacugcugaaggcacuggucagacagcagcugccggaaaaguacaaggaaaucuucuucgaccagagcaagaacggauacgcaggauacaucgacggaggagcaagccaggaagaauucuacaaguucaucaagccgauccuggaaaagauggacggaacagaagaacugcuggucaagcugaacagagaagaccugcugagaaagcagagaacauucgacaacggaagcaucccgcaccagauccaccugggagaacugcacgcaauccugagaagacaggaagacuucuacccguuccugaaggacaacagagaaaagaucgaaaagauccugacauucagaaucccguacuacgucggaccgcuggcaagaggaaacagcagauucgcauggaugacaagaaagagcgaagaaacaaucacaccguggaacuucgaagaagucgucgacaagggagcaagcgcacagagcuucaucgaaagaaugacaaacuucgacaagaaccugccgaacgaaaagguccugccgaagcacagccugcuguacgaauacuucacagucuacaacgaacugacaaaggucaaguacgucacagaaggaaugagaaagccggcauuccugagcggagaacagaagaaggcaaucgucgaccugcuguucaagacaaacagaaaggucacagucaagcagcugaaggaagacuacuucaagaagaucgaaugcuucgacagcgucgaaaucagcggagucgaagacagauucaacgcaagccugggaacauaccacgaccugcugaagaucaucaaggacaaggacuuccuggacaacgaagaaaacgaagacauccuggaagacaucguccugacacugacacuguucgaagacagagaaaugaucgaagaaagacugaagacauacgcacaccuguucgacgacaaggucaugaagcagcugaagagaagaagauacacaggauggggaagacugagcagaaagcugaucaacggaaucagagacaagcagagcggaaagacaauccuggacuuccugaagagcgacggauucgcaaacagaaacuucaugcagcugauccacgacgacagccugacauucaaggaagacauccagaaggcacaggucagcggacagggagacagccugcacgaacacaucgcaaaccuggcaggaagcccggcaaucaagaagggaauccugcagacagucaaggucgucgacgaacuggucaaggucaugggaagacacaagccggaaaacaucgucaucgaaauggcaagagaaaaccagacaacacagaagggacagaagaacagcagagaaagaaugaagagaaucgaagaaggaaucaaggaacugggaagccagauccugaaggaacacccggucgaaaacacacagcugcagaacgaaaagcuguaccuguacuaccugcagaacggaagagacauguacgucgaccaggaacuggacaucaacagacugagcgacuacgacgucgaccacaucgucccgcagagcuuccugaaggacgacagcaucgacaacaagguccugacaagaagcgacaagaacagaggaaagagcgacaacgucccgagcgaagaagucgucaagaagaugaagaacuacuggagacagcugcugaacgcaaagcugaucacacagagaaaguucgacaaccugacaaaggcagagagaggaggacugagcgaacuggacaaggcaggauucaucaagagacagcuggucgaaacaagacagaucacaaagcacgucgcacagauccuggacagcagaaugaacacaaaguacgacgaaaacgacaagcugaucagagaagucaaggucaucacacugaagagcaagcuggucagcgacuucagaaaggacuuccaguucuacaaggucagagaaaucaacaacuaccaccacgcacacgacgcauaccugaacgcagucgucggaacagcacugaucaagaaguacccgaagcuggaaagcgaauucgucuacggagacuacaaggucuacgacgucagaaagaugaucgcaaagagcgaacaggaaaucggaaaggcaacagcaaaguacuucuucuacagcaacaucaugaacuucuucaagacagaaaucacacuggcaaacggagaaaucagaaagagaccgcugaucgaaacaaacggagaaacaggagaaaucgucugggacaagggaagagacuucgcaacagucagaaagguccugagcaugccgcaggucaacaucgucaagaagacagaaguccagacaggaggauucagcaaggaaagcauccugccgaagagaaacagcgacaagcugaucgcaagaaagaaggacugggacccgaagaaguacggaggauucgacagcccgacagucgcauacagcguccuggucgucgcaaaggucgaaaagggaaagagcaagaagcugaagagcgucaaggaacugcugggaaucacaaucauggaaagaagcagcuucgaaaagaacccgaucgacuuccuggaagcaaagggauacaaggaagucaagaaggaccugaucaucaagcugccgaaguacagccuguucgaacuggaaaacggaagaaagagaaugcuggcaagcgcaggagaacugcagaagggaaacgaacuggcacugccgagcaaguacgucaacuuccuguaccuggcaagccacuacgaaaagcugaagggaagcccggaagacaacgaacagaagcagcuguucgucgaacagcacaagcacuaccuggacgaaaucaucgaacagaucagcgaauucagcaagagagucauccuggcagacgcaaaccuggacaagguccugagcgcauacaacaagcacagagacaagccgaucagagaacaggcagaaaacaucauccaccuguucacacugacaaaccugggagcaccggcagcauucaaguacuucgacacaacaaucgacagaaagagauacacaagcacaaaggaaguccuggacgcaacacugauccaccagagcaucacaggacuguacgaaacaagaaucgaccugagccagcugggaggagacuag

SEQ ID NO: 1114 - RNA, 4101 nt, Artificial Sequence
  Synthetic
gacaagaaguacagcaucggacuggcaaucggaacaaacagcgucggaugggcagucaucacagacgaauacaaggucccgagcaagaaguucaagguccugggaaacacagacagacacagcaucaagaagaaccugaucggagcacugcuguucgacagcggagaaacagcagaagcaacaagacugaagagaacagcaagaagaagauacacaagaagaaagaacagaaucugcuaccugcaggaaaucuucagcaacgaaauggcaaaggucgacgacagcuucuuccacagacuggaagaaagcuuccuggucgaagaagacaagaagcacgaaagacacccgaucuucggaaacaucgucgacgaagucgcauaccacgaaaaguacccgacaaucuaccaccugagaaagaagcuggucgacagcacagacaaggcagaccugagacugaucuaccuggcacuggcacacaugaucaaguucagaggacacuuccugaucgaaggagaccugaacccggacaacagcgacgucgacaagcuguucauccagcugguccagacauacaaccagcuguucgaagaaaacccgaucaacgcaagcggagucgacgcaaaggcaauccugagcgcaagacugagcaagagcagaagacuggaaaaccugaucgcacagcugccgggagaaaagaagaacggacuguucggaaaccugaucgcacugagccugggacugacaccgaacuucaagagcaacuucgaccuggcagaagacgcaaagcugcagcugagcaaggacacauacgacgacgaccuggacaaccugcuggcacagaucggagaccaguacgcagaccuguuccuggcagcaaagaaccugagcgacgcaauccugcugagcgacauccugagagucaacacagaaaucacaaaggcaccgcugagcgcaagcaugaucaagagauacgacgaacaccaccaggaccugacacugcugaaggcacuggucagacagcagcugccggaaaaguacaaggaaaucuucuucgaccagagcaagaacggauacgcaggauacaucgacggaggagcaagccaggaagaauucuacaaguucaucaagccgauccuggaaaagauggacggaacagaagaacugcuggucaagcugaacagagaagaccugcugagaaagcagagaacauucgacaacggaagcaucccgcaccagauccaccugggagaacugcacgcaauccugagaagacaggaagacuucuacccguuccugaaggacaacagagaaaagaucgaaaagauccugacauucagaaucccguacuacgucggaccgcuggcaagaggaaacagcagauucgcauggaugacaagaaagagcgaagaaacaaucacaccguggaacuucgaagaagucgucgacaagggagcaagcgcacagagcuucaucgaaagaaugacaaacuucgacaagaaccugccgaacgaaaagguccugccgaagcacagccugcuguacgaauacuucacagucuacaacgaacugacaaaggucaaguacgucacagaaggaaugagaaagccggcauuccugagcggagaacagaagaaggcaaucgucgaccugcuguucaagacaaacagaaaggucacagucaagcagcugaaggaagacuacuucaagaagaucgaaugcuucgacagcgucgaaaucagcggagucgaagacagauucaacgcaagccugggaacauaccacgaccugcugaagaucaucaaggacaaggacuuccuggacaacgaagaaaacgaagacauccuggaagacaucguccugacacugacacuguucgaagacagagaaaugaucgaagaaagacugaagacauacgcacaccuguucgacgacaaggucaugaagcagcugaagagaagaagauacacaggauggggaagacugagcagaaagcugaucaacggaaucagagacaagcagagcggaaagacaauccuggacuuccugaagagcgacggauucgcaaacagaaacuucaugcagcugauccacgacgacagccugacauucaaggaagacauccagaaggcacaggucagcggacagggagacagccugcacgaacacaucgcaaaccuggcaggaagcccggcaaucaagaagggaauccugcagacagucaaggucgucgacgaacuggucaaggucaugggaagacacaagccggaaaacaucgucaucgaaauggcaagagaaaaccagacaacacagaagggacagaagaacagcagagaaagaaugaagagaaucgaagaaggaaucaaggaacugggaagccagauccugaaggaacacccggucgaaaacacacagcugcagaacgaaaagcuguaccuguacuaccugcagaacggaagagacauguacgucgaccaggaacuggacaucaacagacugagcgacuacgacgucgaccacaucgucccgcagagcuuccugaaggacgacagcaucgacaacaagguccugacaagaagcgacaagaacagaggaaagagcgacaacgucccgagcgaagaagucgucaagaagaugaagaacuacuggagacagcugcugaacgcaaagcugaucacacagagaaaguucgacaaccugacaaaggcagagagaggaggacugagcgaacuggacaaggcaggauucaucaagagacagcuggucgaaacaagacagaucacaaagcacgucgcacagauccuggacagcagaaugaacacaaaguacgacgaaaacgacaagcugaucagagaagucaaggucaucacacugaagagcaagcuggucagcgacuucagaaaggacuuccaguucuacaaggucagagaaaucaacaacuaccaccacgcacacgacgcauaccugaacgcagucgucggaacagcacugaucaagaaguacccgaagcuggaaagcgaauucgucuacggagacuacaaggucuacgacgucagaaagaugaucgcaaagagcgaacaggaaaucggaaaggcaacagcaaaguacuucuucuacagcaacaucaugaacuucuucaagacagaaaucacacuggcaaacggagaaaucagaaagagaccgcugaucgaaacaaacggagaaacaggagaaaucgucugggacaagggaagagacuucgcaacagucagaaagguccugagcaugccgcaggucaacaucgucaagaagacagaaguccagacaggaggauucagcaaggaaagcauccugccgaagagaaacagcgacaagcugaucgcaagaaagaaggacugggacccgaagaaguacggaggauucgacagcccgacagucgcauacagcguccuggucgucgcaaaggucgaaaagggaaagagcaagaagcugaagagcgucaaggaacugcugggaaucacaaucauggaaagaagcagcuucgaaaagaacccgaucgacuuccuggaagcaaagggauacaaggaagucaagaaggaccugaucaucaagcugccgaaguacagccuguucgaacuggaaaacggaagaaagagaaugcuggcaagcgcaggagaacugcagaagggaaacgaacuggcacugccgagcaaguacgucaacuuccuguaccuggcaagccacuacgaaaagcugaagggaagcccggaagacaacgaacagaagcagcuguucgucgaacagcacaagcacuaccuggacgaaaucaucgaacagaucagcgaauucagcaagagagucauccuggcagacgcaaaccuggacaagguccugagcgcauacaacaagcacagagacaagccgaucagagaacaggcagaaaacaucauccaccuguucacacugacaaaccugggagcaccggcagcauucaaguacuucgacacaacaaucgacagaaagagauacacaagcacaaaggaaguccuggacgcaacacugauccaccagagcaucacaggacuguacgaaacaagaaucgaccugagccagcugggaggagac

SEQ ID NO: 1115 - RNA, 4107 nt, Artificial Sequence
  Synthetic
auggacaagaaguacagcaucggacuggcaaucggaacaaacagcgucggaugggcagucaucacagacgaauacaaggucccgagcaagaaguucaagguccugggaaacacagacagacacagcaucaagaagaaccugaucggagcacugcuguucgacagcggagaaacagcagaagcaacaagacugaagagaacagcaagaagaagauacacaagaagaaagaacagaaucugcuaccugcaggaaaucuucagcaacgaaauggcaaaggucgacgacagcuucuuccacagacuggaagaaagcuuccuggucgaagaagacaagaagcacgaaagacacccgaucuucggaaacaucgucgacgaagucgcauaccacgaaaaguacccgacaaucuaccaccugagaaagaagcuggucgacagcacagacaaggcagaccugagacugaucuaccuggcacuggcacacaugaucaaguucagaggacacuuccugaucgaaggagaccugaacccggacaacagcgacgucgacaagcuguucauccagcugguccagacauacaaccagcuguucgaagaaaacccgaucaacgcaagcggagucgacgcaaaggcaauccugagcgcaagacugagcaagagcagaagacuggaaaaccugaucgcacagcugccgggagaaaagaagaacggacuguucggaaaccugaucgcacugagccugggacugacaccgaacuucaagagcaacuucgaccuggcagaagacgcaaagcugcagcugagcaaggacacauacgacgacgaccuggacaaccugcuggcacagaucggagaccaguacgcagaccuguuccuggcagcaaagaaccugagcgacgcaauccugcugagcgacauccugagagucaacacagaaaucacaaaggcaccgcugagcgcaagcaugaucaagagauacgacgaacaccaccaggaccugacacugcugaaggcacuggucagacagcagcugccggaaaaguacaaggaaaucuucuucgaccagagcaagaacggauacgcaggauacaucgacggaggagcaagccaggaagaauucuacaaguucaucaagccgauccuggaaaagauggacggaacagaagaacugcuggucaagcugaacagagaagaccugcugagaaagcagagaacauucgacaacggaagcaucccgcaccagauccaccugggagaacugcacgcaauccugagaagacaggaagacuucuacccguuccugaaggacaacagagaaaagaucgaaaagauccugacauucagaaucccguacuacgucggaccgcuggcaagaggaaacagcagauucgcauggaugacaagaaagagcgaagaaacaaucacaccguggaacuucgaagaagucgucgacaagggagcaagcgcacagagcuucaucgaaagaaugacaaacuucgacaagaaccugccgaacgaaaagguccugccgaagcacagccugcuguacgaauacuucacagucuacaacgaacugacaaaggucaaguacgucacagaaggaaugagaaagccggcauuccugagcggagaacagaagaaggcaaucgucgaccugcuguucaagacaaacagaaaggucacagucaagcagcugaaggaagacuacuucaagaagaucgaaugcuucgacagcgucgaaaucagcggagucgaagacagauucaacgcaagccugggaacauaccacgaccugcugaagaucaucaaggacaaggacuuccuggacaacgaagaaaacgaagacauccuggaagacaucguccugacacugacacuguucgaagacagagaaaugaucgaagaaagacugaagacauacgcacaccuguucgacgacaaggucaugaagcagcugaagagaagaagauacacaggauggggaagacugagcagaaagcugaucaacggaaucagagacaagcagagcggaaagacaauccuggacuuccugaagagcgacggauucgcaaacagaaacuucaugcagcugauccacgacgacagccugacauucaaggaagacauccagaaggcacaggucagcggacagggagacagccugcacgaacacaucgcaaaccuggcaggaagcccggcaaucaagaagggaauccugcagacagucaaggucgucgacgaacuggucaaggucaugggaagacacaagccggaaaacaucgucaucgaaauggcaagagaaaaccagacaacacagaagggacagaagaacagcagagaaagaaugaagagaaucgaagaaggaaucaaggaacugggaagccagauccugaaggaacacccggucgaaaacacacagcugcagaacgaaaagcuguaccuguacuaccugcagaacggaagagacauguacgucgaccaggaacuggacaucaacagacugagcgacuacgacgucgacgcaaucgucccgcagagcuuccugaaggacgacagcaucgacaacaagguccugacaagaagcgacaagaacagaggaaagagcgacaacgucccgagcgaagaagucgucaagaagaugaagaacuacuggagacagcugcugaacgcaaagcugaucacacagagaaaguucgacaaccugacaaaggcagagagaggaggacugagcgaacuggacaaggcaggauucaucaagagacagcuggucgaaacaagacagaucacaaagcacgucgcacagauccuggacagcagaaugaacacaaaguacgacgaaaacgacaagcugaucagagaagucaaggucaucacacugaagagcaagcuggucagcgacuucagaaaggacuuccaguucuacaaggucagagaaaucaacaacuaccaccacgcacacgacgcauaccugaacgcagucgucggaacagcacugaucaagaaguacccgaagcuggaaagcgaauucgucuacggagacuacaaggucuacgacgucagaaagaugaucgcaaagagcgaacaggaaaucggaaaggcaacagcaaaguacuucuucuacagcaacaucaugaacuucuucaagacagaaaucacacuggcaaacggagaaaucagaaagagaccgcugaucgaaacaaacggagaaacaggagaaaucgucugggacaagggaagagacuucgcaacagucagaaagguccugagcaugccgcaggucaacaucgucaagaagacagaaguccagacaggaggauucagcaaggaaagcauccugccgaagagaaacagcgacaagcugaucgcaagaaagaaggacugggacccgaagaaguacggaggauucgacagcccgacagucgcauacagcguccuggucgucgcaaaggucgaaaagggaaagagcaagaagcugaagagcgucaaggaacugcugggaaucacaaucauggaaagaagcagcuucgaaaagaacccgaucgacuuccuggaagcaaagggauacaaggaagucaagaaggaccugaucaucaagcugccgaaguacagccuguucgaacuggaaaacggaagaaagagaaugcuggcaagcgcaggagaacugcagaagggaaacgaacuggcacugccgagcaaguacgucaacuuccuguaccuggcaagccacuacgaaaagcugaagggaagcccggaagacaacgaacagaagcagcuguucgucgaacagcacaagcacuaccuggacgaaaucaucgaacagaucagcgaauucagcaagagagucauccuggcagacgcaaaccuggacaagguccugagcgcauacaacaagcacagagacaagccgaucagagaacaggcagaaaacaucauccaccuguucacacugacaaaccugggagcaccggcagcauucaaguacuucgacacaacaaucgacagaaagagauacacaagcacaaaggaaguccuggacgcaacacugauccaccagagcaucacaggacuguacgaaacaagaaucgaccugagccagcugggaggagacuag

SEQ ID NO: 1116 - RNA, 4113 nt, Artificial Sequence
  Synthetic
gacaagaaguacagcaucggacuggcaaucggaacaaacagcgucggaugggcagucaucacagacgaauacaaggucccgagcaagaaguucaagguccugggaaacacagacagacacagcaucaagaagaaccugaucggagcacugcuguucgacagcggagaaacagcagaagcaacaagacugaagagaacagcaagaagaagauacacaagaagaaagaacagaaucugcuaccugcaggaaaucuucagcaacgaaauggcaaaggucgacgacagcuucuuccacagacuggaagaaagcuuccuggucgaagaagacaagaagcacgaaagacacccgaucuucggaaacaucgucgacgaagucgcauaccacgaaaaguacccgacaaucuaccaccugagaaagaagcuggucgacagcacagacaaggcagaccugagacugaucuaccuggcacuggcacacaugaucaaguucagaggacacuuccugaucgaaggagaccugaacccggacaacagcgacgucgacaagcuguucauccagcugguccagacauacaaccagcuguucgaagaaaacccgaucaacgcaagcggagucgacgcaaaggcaauccugagcgcaagacugagcaagagcagaagacuggaaaaccugaucgcacagcugccgggagaaaagaagaacggacuguucggaaaccugaucgcacugagccugggacugacaccgaacuucaagagcaacuucgaccuggcagaagacgcaaagcugcagcugagcaaggacacauacgacgacgaccuggacaaccugcuggcacagaucggagaccaguacgcagaccuguuccuggcagcaaagaaccugagcgacgcaauccugcugagcgacauccugagagucaacacagaaaucacaaaggcaccgcugagcgcaagcaugaucaagagauacgacgaacaccaccaggaccugacacugcugaaggcacuggucagacagcagcugccggaaaaguacaaggaaaucuucuucgaccagagcaagaacggauacgcaggauacaucgacggaggagcaagccaggaagaauucuacaaguucaucaagccgauccuggaaaagauggacggaacagaagaacugcuggucaagcugaacagagaagaccugcugagaaagcagagaacauucgacaacggaagcaucccgcaccagauccaccugggagaacugcacgcaauccugagaagacaggaagacuucuacccguuccugaaggacaacagagaaaagaucgaaaagauccugacauucagaaucccguacuacgucggaccgcuggcaagaggaaacagcagauucgcauggaugacaagaaagagcgaagaaacaaucacaccguggaacuucgaagaagucgucgacaagggagcaagcgcacagagcuucaucgaaagaaugacaaacuucgacaagaaccugccgaacgaaaagguccugccgaagcacagccugcuguacgaauacuucacagucuacaacgaacugacaaaggucaaguacgucacagaaggaaugagaaagccggcauuccugagcggagaacagaagaaggcaaucgucgaccugcuguucaagacaaacagaaaggucacagucaagcagcugaaggaagacuacuucaagaagaucgaaugcuucgacagcgucgaaaucagcggagucgaagacagauucaacgcaagccugggaacauaccacgaccugcugaagaucaucaaggacaaggacuuccuggacaacgaagaaaacgaagacauccuggaagacaucguccugacacugacacuguucgaagacagagaaaugaucgaagaaagacugaagacauacgcacaccuguucgacgacaaggucaugaagcagcugaagagaagaagauacacaggauggggaagacugagcagaaagcugaucaacggaaucagagacaagcagagcggaaagacaauccuggacuuccugaagagcgacggauucgcaaacagaaacuucaugcagcugauccacgacgacagccugacauucaaggaagacauccagaaggcacaggucagcggacagggagacagccugcacgaacacaucgcaaaccuggcaggaagcccggcaaucaagaagggaauccugcagacagucaaggucgucgacgaacuggucaaggucaugggaagacacaagccggaaaacaucgucaucgaaauggcaagagaaaaccagacaacacagaagggacagaagaacagcagagaaagaaugaagagaaucgaagaaggaaucaaggaacugggaagccagauccugaaggaacacccggucgaaaacacacagcugcagaacgaaaagcuguaccuguacuaccugcagaacggaagagacauguacgucgaccaggaacuggacaucaacagacugagcgacuacgacgucgacgcaaucgucccgcagagcuuccugaaggacgacagcaucgacaacaagguccugacaagaagcgacaagaacagaggaaagagcgacaacgucccgagcgaagaagucgucaagaagaugaagaacuacuggagacagcugcugaacgcaaagcugaucacacagagaaaguucgacaaccugacaaaggcagagagaggaggacugagcgaacuggacaaggcaggauucaucaagagacagcuggucgaaacaagacagaucacaaagcacgucgcacagauccuggacagcagaaugaacacaaaguacgacgaaaacgacaagcugaucagagaagucaaggucaucacacugaagagcaagcuggucagcgacuucagaaaggacuuccaguucuacaaggucagagaaaucaacaacuaccaccacgcacacgacgcauaccugaacgcagucgucggaacagcacugaucaagaaguacccgaagcuggaaagcgaauucgucuacggagacuacaaggucuacgacgucagaaagaugaucgcaaagagcgaacaggaaaucggaaaggcaacagcaaaguacuucuucuacagcaacaucaugaacuucuucaagacagaaaucacacuggcaaacggagaaaucagaaagagaccgcugaucgaaacaaacggagaaacaggagaaaucgucugggacaagggaagagacuucgcaacagucagaaagguccugagcaugccgcaggucaacaucgucaagaagacagaaguccagacaggaggauucagcaaggaaagcauccugccgaagagaaacagcgacaagcugaucgcaagaaagaaggacugggacccgaagaaguacggaggauucgacagcccgacagucgcauacagcguccuggucgucgcaaaggucgaaaagggaaagagcaagaagcugaagagcgucaaggaacugcugggaaucacaaucauggaaagaagcagcuucgaaaagaacccgaucgacuuccuggaagcaaagggauacaaggaagucaagaaggaccugaucaucaagcugccgaaguacagccuguucgaacuggaaaacggaagaaagagaaugcuggcaagcgcaggagaacugcagaagggaaacgaacuggcacugccgagcaaguacgucaacuuccuguaccuggcaagccacuacgaaaagcugaagggaagcccggaagacaacgaacagaagcagcuguucgucgaacagcacaagcacuaccuggacgaaaucaucgaacagaucagcgaauucagcaagagagucauccuggcagacgcaaaccuggacaagguccugagcgcauacaacaagcacagagacaagccgaucagagaacaggcagaaaacaucauccaccuguucacacugacaaaccugggagcaccggcagcauucaaguacuucgacacaacaaucgacagaaagagauacacaagcacaaaggaaguccuggacgcaacacugauccaccagagcaucacaggacuguacgaaacaagaaucgaccugagccagcugggaggagacggaggaggaagc

SEQ ID NO: 1117 - RNA, 4179 nt, Artificial Sequence
  Synthetic
auggacaagaaguacagcaucggacuggacaucggaacaaacagcgucggaugggcagucaucacagacgaauacaaggucccgagcaagaaguucaagguccugggaaacacagacagacacagcaucaagaagaaccugaucggagcacugcuguucgacagcggagaaacagcagaagcaacaagacugaagagaacagcaagaagaagauacacaagaagaaagaacagaaucugcuaccugcaggaaaucuucagcaacgaaauggcaaaggucgacgacagcuucuuccacagacuggaagaaagcuuccuggucgaagaagacaagaagcacgaaagacacccgaucuucggaaacaucgucgacgaagucgcauaccacgaaaaguacccgacaaucuaccaccugagaaagaagcuggucgacagcacagacaaggcagaccugagacugaucuaccuggcacuggcacacaugaucaaguucagaggacacuuccugaucgaaggagaccugaacccggacaacagcgacgucgacaagcuguucauccagcugguccagacauacaaccagcuguucgaagaaaacccgaucaacgcaagcggagucgacgcaaaggcaauccugagcgcaagacugagcaagagcagaagacuggaaaaccugaucgcacagcugccgggagaaaagaagaacggacuguucggaaaccugaucgcacugagccugggacugacaccgaacuucaagagcaacuucgaccuggcagaagacgcaaagcugcagcugagcaaggacacauacgacgacgaccuggacaaccugcuggcacagaucggagaccaguacgcagaccuguuccuggcagcaaagaaccugagcgacgcaauccugcugagcgacauccugagagucaacacagaaaucacaaaggcaccgcugagcgcaagcaugaucaagagauacgacgaacaccaccaggaccugacacugcugaaggcacuggucagacagcagcugccggaaaaguacaaggaaaucuucuucgaccagagcaagaacggauacgcaggauacaucgacggaggagcaagccaggaagaauucuacaaguucaucaagccgauccuggaaaagauggacggaacagaagaacugcuggucaagcugaacagagaagaccugcugagaaagcagagaacauucgacaacggaagcaucccgcaccagauccaccugggagaacugcacgcaauccugagaagacaggaagacuucuacccguuccugaaggacaacagagaaaagaucgaaaagauccugacauucagaaucccguacuacgucggaccgcuggcaagaggaaacagcagauucgcauggaugacaagaaagagcgaagaaacaaucacaccguggaacuucgaagaagucgucgacaagggagcaagcgcacagagcuucaucgaaagaaugacaaacuucgacaagaaccugccgaacgaaaagguccugccgaagcacagccugcuguacgaauacuucacagucuacaacgaacugacaaaggucaaguacgucacagaaggaaugagaaagccggcauuccugagcggagaacagaagaaggcaaucgucgaccugcuguucaagacaaacagaaaggucacagucaagcagcugaaggaagacuacuucaagaagaucgaaugcuucgacagcgucgaaaucagcggagucgaagacagauucaacgcaagccugggaacauaccacgaccugcugaagaucaucaaggacaaggacuuccuggacaacgaagaaaacgaagacauccuggaagacaucguccugacacugacacuguucgaagacagagaaaugaucgaagaaagacugaagacauacgcacaccuguucgacgacaaggucaugaagcagcugaagagaagaagauacacaggauggggaagacugagcagaaagcugaucaacggaaucagagacaagcagagcggaaagacaauccuggacuuccugaagagcgacggauucgcaaacagaaacuucaugcagcugauccacgacgacagccugacauucaaggaagacauccagaaggcacaggucagcggacagggagacagccugcacgaacacaucgcaaaccuggcaggaagcccggcaaucaagaagggaauccugcagacagucaaggucgucgacgaacuggucaaggucaugggaagacacaagccggaaaacaucgucaucgaaauggcaagagaaaaccagacaacacagaagggacagaagaacagcagagaaagaaugaagagaaucgaagaaggaaucaaggaacugggaagccagauccugaaggaacacccggucgaaaacacacagcugcagaacgaaaagcuguaccuguacuaccugcagaacggaagagacauguacgucgaccaggaacuggacaucaacagacugagcgacuacgacgucgaccacaucgucccgcagagcuuccugaaggacgacagcaucgacaacaagguccugacaagaagcgacaagaacagaggaaagagcgacaacgucccgagcgaagaagucgucaagaagaugaagaacuacuggagacagcugcugaacgcaaagcugaucacacagagaaaguucgacaaccugacaaaggcagagagaggaggacugagcgaacuggacaaggcaggauucaucaagagacagcuggucgaaacaagacagaucacaaagcacgucgcacagauccuggacagcagaaugaacacaaaguacgacgaaaacgacaagcugaucagagaagucaaggucaucacacugaagagcaagcuggucagcgacuucagaaaggacuuccaguucuacaaggucagagaaaucaacaacuaccaccacgcacacgacgcauaccugaacgcagucgucggaacagcacugaucaagaaguacccgaagcuggaaagcgaauucgucuacggagacuacaaggucuacgacgucagaaagaugaucgcaaagagcgaacaggaaaucggaaaggcaacagcaaaguacuucuucuacagcaacaucaugaacuucuucaagacagaaaucacacuggcaaacggagaaaucagaaagagaccgcugaucgaaacaaacggagaaacaggagaaaucgucugggacaagggaagagacuucgcaacagucagaaagguccugagcaugccgcaggucaacaucgucaagaagacagaaguccagacaggaggauucagcaaggaaagcauccugccgaagagaaacagcgacaagcugaucgcaagaaagaaggacugggacccgaagaaguacggaggauucgacagcccgacagucgcauacagcguccuggucgucgcaaaggucgaaaagggaaagagcaagaagcugaagagcgucaaggaacugcugggaaucacaaucauggaaagaagcagcuucgaaaagaacccgaucgacuuccuggaagcaaagggauacaaggaagucaagaaggaccugaucaucaagcugccgaaguacagccuguucgaacuggaaaacggaagaaagagaaugcuggcaagcgcaggagaacugcagaagggaaacgaacuggcacugccgagcaaguacgucaacuuccuguaccuggcaagccacuacgaaaagcugaagggaagcccggaagacaacgaacagaagcagcuguucgucgaacagcacaagcacuaccuggacgaaaucaucgaacagaucagcgaauucagcaagagagucauccuggcagacgcaaaccuggacaagguccugagcgcauacaacaagcacagagacaagccgaucagagaacaggcagaaaacaucauccaccuguucacacugacaaaccugggagcaccggcagcauucaaguacuucgacacaacaaucgacagaaagagauacacaagcacaaaggaaguccuggacgcaacacugauccaccagagcaucacaggacuguacgaaacaagaaucgaccugagccagcugggaggagacggaagcggaagcccgaagaagaagagaaaggucgacggaagcccgaagaagaagagaaaggucgacagcggauag

SEQ ID NO: 1118 - RNA, 4173 nt, Artificial Sequence
  Synthetic
gacaagaaguacagcaucggacuggacaucggaacaaacagcgucggaugggcagucaucacagacgaauacaaggucccgagcaagaaguucaagguccugggaaacacagacagacacagcaucaagaagaaccugaucggagcacugcuguucgacagcggagaaacagcagaagcaacaagacugaagagaacagcaagaagaagauacacaagaagaaagaacagaaucugcuaccugcaggaaaucuucagcaacgaaauggcaaaggucgacgacagcuucuuccacagacuggaagaaagcuuccuggucgaagaagacaagaagcacgaaagacacccgaucuucggaaacaucgucgacgaagucgcauaccacgaaaaguacccgacaaucuaccaccugagaaagaagcuggucgacagcacagacaaggcagaccugagacugaucuaccuggcacuggcacacaugaucaaguucagaggacacuuccugaucgaaggagaccugaacccggacaacagcgacgucgacaagcuguucauccagcugguccagacauacaaccagcuguucgaagaaaacccgaucaacgcaagcggagucgacgcaaaggcaauccugagcgcaagacugagcaagagcagaagacuggaaaaccugaucgcacagcugccgggagaaaagaagaacggacuguucggaaaccugaucgcacugagccugggacugacaccgaacuucaagagcaacuucgaccuggcagaagacgcaaagcugcagcugagcaaggacacauacgacgacgaccuggacaaccugcuggcacagaucggagaccaguacgcagaccuguuccuggcagcaaagaaccugagcgacgcaauccugcugagcgacauccugagagucaacacagaaaucacaaaggcaccgcugagcgcaagcaugaucaagagauacgacgaacaccaccaggaccugacacugcugaaggcacuggucagacagcagcugccggaaaaguacaaggaaaucuucuucgaccagagcaagaacggauacgcaggauacaucgacggaggagcaagccaggaagaauucuacaaguucaucaagccgauccuggaaaagauggacggaacagaagaacugcuggucaagcugaacagagaagaccugcugagaaagcagagaacauucgacaacggaagcaucccgcaccagauccaccugggagaacugcacgcaauccugagaagacaggaagacuucuacccguuccugaaggacaacagagaaaagaucgaaaagauccugacauucagaaucccguacuacgucggaccgcuggcaagaggaaacagcagauucgcauggaugacaagaaagagcgaagaaacaaucacaccguggaacuucgaagaagucgucgacaagggagcaagcgcacagagcuucaucgaaagaaugacaaacuucgacaagaaccugccgaacgaaaagguccugccgaagcacagccugcuguacgaauacuucacagucuacaacgaacugacaaaggucaaguacgucacagaaggaaugagaaagccggcauuccugagcggagaacagaagaaggcaaucgucgaccugcuguucaagacaaacagaaaggucacagucaagcagcugaaggaagacuacuucaagaagaucgaaugcuucgacagcgucgaaaucagcggagucgaagacagauucaacgcaagccugggaacauaccacgaccugcugaagaucaucaaggacaaggacuuccuggacaacgaagaaaacgaagacauccuggaagacaucguccugacacugacacuguucgaagacagagaaaugaucgaagaaagacugaagacauacgcacaccuguucgacgacaaggucaugaagcagcugaagagaagaagauacacaggauggggaagacugagcagaaagcugaucaacggaaucagagacaagcagagcggaaagacaauccuggacuuccugaagagcgacggauucgcaaacagaaacuucaugcagcugauccacgacgacagccugacauucaaggaagacauccagaaggcacaggucagcggacagggagacagccugcacgaacacaucgcaaaccuggcaggaagcccggcaaucaagaagggaauccugcagacagucaaggucgucgacgaacuggucaaggucaugggaagacacaagccggaaaacaucgucaucgaaauggcaagagaaaaccagacaacacagaagggacagaagaacagcagagaaagaaugaagagaaucgaagaaggaaucaaggaacugggaagccagauccugaaggaacacccggucgaaaacacacagcugcagaacgaaaagcuguaccuguacuaccugcagaacggaagagacauguacgucgaccaggaacuggacaucaacagacugagcgacuacgacgucgaccacaucgucccgcagagcuuccugaaggacgacagcaucgacaacaagguccugacaagaagcgacaagaacagaggaaagagcgacaacgucccgagcgaagaagucgucaagaagaugaagaacuacuggagacagcugcugaacgcaaagcugaucacacagagaaaguucgacaaccugacaaaggcagagagaggaggacugagcgaacuggacaaggcaggauucaucaagagacagcuggucgaaacaagacagaucacaaagcacgucgcacagauccuggacagcagaaugaacacaaaguacgacgaaaacgacaagcugaucagagaagucaaggucaucacacugaagagcaagcuggucagcgacuucagaaaggacuuccaguucuacaaggucagagaaaucaacaacuaccaccacgcacacgacgcauaccugaacgcagucgucggaacagcacugaucaagaaguacccgaagcuggaaagcgaauucgucuacggagacuacaaggucuacgacgucagaaagaugaucgcaaagagcgaacaggaaaucggaaaggcaacagcaaaguacuucuucuacagcaacaucaugaacuucuucaagacagaaaucacacuggcaaacggagaaaucagaaagagaccgcugaucgaaacaaacggagaaacaggagaaaucgucugggacaagggaagagacuucgcaacagucagaaagguccugagcaugccgcaggucaacaucgucaagaagacagaaguccagacaggaggauucagcaaggaaagcauccugccgaagagaaacagcgacaagcugaucgcaagaaagaaggacugggacccgaagaaguacggaggauucgacagcccgacagucgcauacagcguccuggucgucgcaaaggucgaaaagggaaagagcaagaagcugaagagcgucaaggaacugcugggaaucacaaucauggaaagaagcagcuucgaaaagaacccgaucgacuuccuggaagcaaagggauacaaggaagucaagaaggaccugaucaucaagcugccgaaguacagccuguucgaacuggaaaacggaagaaagagaaugcuggcaagcgcaggagaacugcagaagggaaacgaacuggcacugccgagcaaguacgucaacuuccuguaccuggcaagccacuacgaaaagcugaagggaagcccggaagacaacgaacagaagcagcuguucgucgaacagcacaagcacuaccuggacgaaaucaucgaacagaucagcgaauucagcaagagagucauccuggcagacgcaaaccuggacaagguccugagcgcauacaacaagcacagagacaagccgaucagagaacaggcagaaaacaucauccaccuguucacacugacaaaccugggagcaccggcagcauucaaguacuucgacacaacaaucgacagaaagagauacacaagcacaaaggaaguccuggacgcaacacugauccaccagagcaucacaggacuguacgaaacaagaaucgaccugagccagcugggaggagacggaagcggaagcccgaagaagaagagaaaggucgacggaagcccgaagaagaagagaaaggucgacagcgga

SEQ ID NO: 1119 - RNA, 4179 nt, Artificial Sequence
  Synthetic
auggacaagaaguacagcaucggacuggcaaucggaacaaacagcgucggaugggcagucaucacagacgaauacaaggucccgagcaagaaguucaagguccugggaaacacagacagacacagcaucaagaagaaccugaucggagcacugcuguucgacagcggagaaacagcagaagcaacaagacugaagagaacagcaagaagaagauacacaagaagaaagaacagaaucugcuaccugcaggaaaucuucagcaacgaaauggcaaaggucgacgacagcuucuuccacagacuggaagaaagcuuccuggucgaagaagacaagaagcacgaaagacacccgaucuucggaaacaucgucgacgaagucgcauaccacgaaaaguacccgacaaucuaccaccugagaaagaagcuggucgacagcacagacaaggcagaccugagacugaucuaccuggcacuggcacacaugaucaaguucagaggacacuuccugaucgaaggagaccugaacccggacaacagcgacgucgacaagcuguucauccagcugguccagacauacaaccagcuguucgaagaaaacccgaucaacgcaagcggagucgacgcaaaggcaauccugagcgcaagacugagcaagagcagaagacuggaaaaccugaucgcacagcugccgggagaaaagaagaacggacuguucggaaaccugaucgcacugagccugggacugacaccgaacuucaagagcaacuucgaccuggcagaagacgcaaagcugcagcugagcaaggacacauacgacgacgaccuggacaaccugcuggcacagaucggagaccaguacgcagaccuguuccuggcagcaaagaaccugagcgacgcaauccugcugagcgacauccugagagucaacacagaaaucacaaaggcaccgcugagcgcaagcaugaucaagagauacgacgaacaccaccaggaccugacacugcugaaggcacuggucagacagcagcugccggaaaaguacaaggaaaucuucuucgaccagagcaagaacggauacgcaggauacaucgacggaggagcaagccaggaagaauucuacaaguucaucaagccgauccuggaaaagauggacggaacagaagaacugcuggucaagcugaacagagaagaccugcugagaaagcagagaacauucgacaacggaagcaucccgcaccagauccaccugggagaacugcacgcaauccugagaagacaggaagacuucuacccguuccugaaggacaacagagaaaagaucgaaaagauccugacauucagaaucccguacuacgucggaccgcuggcaagaggaaacagcagauucgcauggaugacaagaaagagcgaagaaacaaucacaccguggaacuucgaagaagucgucgacaagggagcaagcgcacagagcuucaucgaaagaaugacaaacuucgacaagaaccugccgaacgaaaagguccugccgaagcacagccugcuguacgaauacuucacagucuacaacgaacugacaaaggucaaguacgucacagaaggaaugagaaagccggcauuccugagcggagaacagaagaaggcaaucgucgaccugcuguucaagacaaacagaaaggucacagucaagcagcugaaggaagacuacuucaagaagaucgaaugcuucgacagcgucgaaaucagcggagucgaagacagauucaacgcaagccugggaacauaccacgaccugcugaagaucaucaaggacaaggacuuccuggacaacgaagaaaacgaagacauccuggaagacaucguccugacacugacacuguucgaagacagagaaaugaucgaagaaagacugaagacauacgcacaccuguucgacgacaaggucaugaagcagcugaagagaagaagauacacaggauggggaagacugagcagaaagcugaucaacggaaucagagacaagcagagcggaaagacaauccuggacuuccugaagagcgacggauucgcaaacagaaacuucaugcagcugauccacgacgacagccugacauucaaggaagacauccagaaggcacaggucagcggacagggagacagccugcacgaacacaucgcaaaccuggcaggaagcccggcaaucaagaagggaauccugcagacagucaaggucgucgacgaacuggucaaggucaugggaagacacaagccggaaaacaucgucaucgaaauggcaagagaaaaccagacaacacagaagggacagaagaacagcagagaaagaaugaagagaaucgaagaaggaaucaaggaacugggaagccagauccugaaggaacacccggucgaaaacacacagcugcagaacgaaaagcuguaccuguacuaccugcagaacggaagagacauguacgucgaccaggaacuggacaucaacagacugagcgacuacgacgucgaccacaucgucccgcagagcuuccugaaggacgacagcaucgacaacaagguccugacaagaagcgacaagaacagaggaaagagcgacaacgucccgagcgaagaagucgucaagaagaugaagaacuacuggagacagcugcugaacgcaaagcugaucacacagagaaaguucgacaaccugacaaaggcagagagaggaggacugagcgaacuggacaaggcaggauucaucaagagacagcuggucgaaacaagacagaucacaaagcacgucgcacagauccuggacagcagaaugaacacaaaguacgacgaaaacgacaagcugaucagagaagucaaggucaucacacugaagagcaagcuggucagcgacuucagaaaggacuuccaguucuacaaggucagagaaaucaacaacuaccaccacgcacacgacgcauaccugaacgcagucgucggaacagcacugaucaagaaguacccgaagcuggaaagcgaauucgucuacggagacuacaaggucuacgacgucagaaagaugaucgcaaagagcgaacaggaaaucggaaaggcaacagcaaaguacuucuucuacagcaacaucaugaacuucuucaagacagaaaucacacuggcaaacggagaaaucagaaagagaccgcugaucgaaacaaacggagaaacaggagaaaucgucugggacaagggaagagacuucgcaacagucagaaagguccugagcaugccgcaggucaacaucgucaagaagacagaaguccagacaggaggauucagcaaggaaagcauccugccgaagagaaacagcgacaagcugaucgcaagaaagaaggacugggacccgaagaaguacggaggauucgacagcccgacagucgcauacagcguccuggucgucgcaaaggucgaaaagggaaagagcaagaagcugaagagcgucaaggaacugcugggaaucacaaucauggaaagaagcagcuucgaaaagaacccgaucgacuuccuggaagcaaagggauacaaggaagucaagaaggaccugaucaucaagcugccgaaguacagccuguucgaacuggaaaacggaagaaagagaaugcuggcaagcgcaggagaacugcagaagggaaacgaacuggcacugccgagcaaguacgucaacuuccuguaccuggcaagccacuacgaaaagcugaagggaagcccggaagacaacgaacagaagcagcuguucgucgaacagcacaagcacuaccuggacgaaaucaucgaacagaucagcgaauucagcaagagagucauccuggcagacgcaaaccuggacaagguccugagcgcauacaacaagcacagagacaagccgaucagagaacaggcagaaaacaucauccaccuguucacacugacaaaccugggagcaccggcagcauucaaguacuucgacacaacaaucgacagaaagagauacacaagcacaaaggaaguccuggacgcaacacugauccaccagagcaucacaggacuguacgaaacaagaaucgaccugagccagcugggaggagacggaagcggaagcccgaagaagaagagaaaggucgacggaagcccgaagaagaagagaaaggucgacagcggauag

SEQ ID NO: 1120 - RNA, 4173 nt, Artificial Sequence
  Synthetic
gacaagaaguacagcaucggacuggcaaucggaacaaacagcgucggaugggcagucaucacagacgaauacaaggucccgagcaagaaguucaagguccugggaaacacagacagacacagcaucaagaagaaccugaucggagcacugcuguucgacagcggagaaacagcagaagcaacaagacugaagagaacagcaagaagaagauacacaagaagaaagaacagaaucugcuaccugcaggaaaucuucagcaacgaaauggcaaaggucgacgacagcuucuuccacagacuggaagaaagcuuccuggucgaagaagacaagaagcacgaaagacacccgaucuucggaaacaucgucgacgaagucgcauaccacgaaaaguacccgacaaucuaccaccugagaaagaagcuggucgacagcacagacaaggcagaccugagacugaucuaccuggcacuggcacacaugaucaaguucagaggacacuuccugaucgaaggagaccugaacccggacaacagcgacgucgacaagcuguucauccagcugguccagacauacaaccagcuguucgaagaaaacccgaucaacgcaagcggagucgacgcaaaggcaauccugagcgcaagacugagcaagagcagaagacuggaaaaccugaucgcacagcugccgggagaaaagaagaacggacuguucggaaaccugaucgcacugagccugggacugacaccgaacuucaagagcaacuucgaccuggcagaagacgcaaagcugcagcugagcaaggacacauacgacgacgaccuggacaaccugcuggcacagaucggagaccaguacgcagaccuguuccuggcagcaaagaaccugagcgacgcaauccugcugagcgacauccugagagucaacacagaaaucacaaaggcaccgcugagcgcaagcaugaucaagagauacgacgaacaccaccaggaccugacacugcugaaggcacuggucagacagcagcugccggaaaaguacaaggaaaucuucuucgaccagagcaagaacggauacgcaggauacaucgacggaggagcaagccaggaagaauucuacaaguucaucaagccgauccuggaaaagauggacggaacagaagaacugcuggucaagcugaacagagaagaccugcugagaaagcagagaacauucgacaacggaagcaucccgcaccagauccaccugggagaacugcacgcaauccugagaagacaggaagacuucuacccguuccugaaggacaacagagaaaagaucgaaaagauccugacauucagaaucccguacuacgucggaccgcuggcaagaggaaacagcagauucgcauggaugacaagaaagagcgaagaaacaaucacaccguggaacuucgaagaagucgucgacaagggagcaagcgcacagagcuucaucgaaagaaugacaaacuucgacaagaaccugccgaacgaaaagguccugccgaagcacagccugcuguacgaauacuucacagucuacaacgaacugacaaaggucaaguacgucacagaaggaaugagaaagccggcauuccugagcggagaacagaagaaggcaaucgucgaccugcuguucaagacaaacagaaaggucacagucaagcagcugaaggaagacuacuucaagaagaucgaaugcuucgacagcgucgaaaucagcggagucgaagacagauucaacgcaagccugggaacauaccacgaccugcugaagaucaucaaggacaaggacuuccuggacaacgaagaaaacgaagacauccuggaagacaucguccugacacugacacuguucgaagacagagaaaugaucgaagaaagacugaagacauacgcacaccuguucgacgacaaggucaugaagcagcugaagagaagaagauacacaggauggggaagacugagcagaaagcugaucaacggaaucagagacaagcagagcggaaagacaauccuggacuuccugaagagcgacggauucgcaaacagaaacuucaugcagcugauccacgacgacagccugacauucaaggaagacauccagaaggcacaggucagcggacagggagacagccugcacgaacacaucgcaaaccuggcaggaagcccggcaaucaagaagggaauccugcagacagucaaggucgucgacgaacuggucaaggucaugggaagacacaagccggaaaacaucgucaucgaaauggcaagagaaaaccagacaacacagaagggacagaagaacagcagagaaagaaugaagagaaucgaagaaggaaucaaggaacugggaagccagauccugaaggaacacccggucgaaaacacacagcugcagaacgaaaagcuguaccuguacuaccugcagaacggaagagacauguacgucgaccaggaacuggacaucaacagacugagcgacuacgacgucgaccacaucgucccgcagagcuuccugaaggacgacagcaucgacaacaagguccugacaagaagcgacaagaacagaggaaagagcgacaacgucccgagcgaagaagucgucaagaagaugaagaacuacuggagacagcugcugaacgcaaagcugaucacacagagaaaguucgacaaccugacaaaggcagagagaggaggacugagcgaacuggacaaggcaggauucaucaagagacagcuggucgaaacaagacagaucacaaagcacgucgcacagauccuggacagcagaaugaacacaaaguacgacgaaaacgacaagcugaucagagaagucaaggucaucacacugaagagcaagcuggucagcgacuucagaaaggacuuccaguucuacaaggucagagaaaucaacaacuaccaccacgcacacgacgcauaccugaacgcagucgucggaacagcacugaucaagaaguacccgaagcuggaaagcgaauucgucuacggagacuacaaggucuacgacgucagaaagaugaucgcaaagagcgaacaggaaaucggaaaggcaacagcaaaguacuucuucuacagcaacaucaugaacuucuucaagacagaaaucacacuggcaaacggagaaaucagaaagagaccgcugaucgaaacaaacggagaaacaggagaaaucgucugggacaagggaagagacuucgcaacagucagaaagguccugagcaugccgcaggucaacaucgucaagaagacagaaguccagacaggaggauucagcaaggaaagcauccugccgaagagaaacagcgacaagcugaucgcaagaaagaaggacugggacccgaagaaguacggaggauucgacagcccgacagucgcauacagcguccuggucgucgcaaaggucgaaaagggaaagagcaagaagcugaagagcgucaaggaacugcugggaaucacaaucauggaaagaagcagcuucgaaaagaacccgaucgacuuccuggaagcaaagggauacaaggaagucaagaaggaccugaucaucaagcugccgaaguacagccuguucgaacuggaaaacggaagaaagagaaugcuggcaagcgcaggagaacugcagaagggaaacgaacuggcacugccgagcaaguacgucaacuuccuguaccuggcaagccacuacgaaaagcugaagggaagcccggaagacaacgaacagaagcagcuguucgucgaacagcacaagcacuaccuggacgaaaucaucgaacagaucagcgaauucagcaagagagucauccuggcagacgcaaaccuggacaagguccugagcgcauacaacaagcacagagacaagccgaucagagaacaggcagaaaacaucauccaccuguucacacugacaaaccugggagcaccggcagcauucaaguacuucgacacaacaaucgacagaaagagauacacaagcacaaaggaaguccuggacgcaacacugauccaccagagcaucacaggacuguacgaaacaagaaucgaccugagccagcugggaggagacggaagcggaagcccgaagaagaagagaaaggucgacggaagcccgaagaagaagagaaaggucgacagcgga

SEQ ID NO: 1121 - RNA, 4179 nt, Artificial Sequence
  Synthetic
auggacaagaaguacagcaucggacuggcaaucggaacaaacagcgucggaugggcagucaucacagacgaauacaaggucccgagcaagaaguucaagguccugggaaacacagacagacacagcaucaagaagaaccugaucggagcacugcuguucgacagcggagaaacagcagaagcaacaagacugaagagaacagcaagaagaagauacacaagaagaaagaacagaaucugcuaccugcaggaaaucuucagcaacgaaauggcaaaggucgacgacagcuucuuccacagacuggaagaaagcuuccuggucgaagaagacaagaagcacgaaagacacccgaucuucggaaacaucgucgacgaagucgcauaccacgaaaaguacccgacaaucuaccaccugagaaagaagcuggucgacagcacagacaaggcagaccugagacugaucuaccuggcacuggcacacaugaucaaguucagaggacacuuccugaucgaaggagaccugaacccggacaacagcgacgucgacaagcuguucauccagcugguccagacauacaaccagcuguucgaagaaaacccgaucaacgcaagcggagucgacgcaaaggcaauccugagcgcaagacugagcaagagcagaagacuggaaaaccugaucgcacagcugccgggagaaaagaagaacggacuguucggaaaccugaucgcacugagccugggacugacaccgaacuucaagagcaacuucgaccuggcagaagacgcaaagcugcagcugagcaaggacacauacgacgacgaccuggacaaccugcuggcacagaucggagaccaguacgcagaccuguuccuggcagcaaagaaccugagcgacgcaauccugcugagcgacauccugagagucaacacagaaaucacaaaggcaccgcugagcgcaagcaugaucaagagauacgacgaacaccaccaggaccugacacugcugaaggcacuggucagacagcagcugccggaaaaguacaaggaaaucuucuucgaccagagcaagaacggauacgcaggauacaucgacggaggagcaagccaggaagaauucuacaaguucaucaagccgauccuggaaaagauggacggaacagaagaacugcuggucaagcugaacagagaagaccugcugagaaagcagagaacauucgacaacggaagcaucccgcaccagauccaccugggagaacugcacgcaauccugagaagacaggaagacuucuacccguuccugaaggacaacagagaaaagaucgaaaagauccugacauucagaaucccguacuacgucggaccgcuggcaagaggaaacagcagauucgcauggaugacaagaaagagcgaagaaacaaucacaccguggaacuucgaagaagucgucgacaagggagcaagcgcacagagcuucaucgaaagaaugacaaacuucgacaagaaccugccgaacgaaaagguccugccgaagcacagccugcuguacgaauacuucacagucuacaacgaacugacaaaggucaaguacgucacagaaggaaugagaaagccggcauuccugagcggagaacagaagaaggcaaucgucgaccugcuguucaagacaaacagaaaggucacagucaagcagcugaaggaagacuacuucaagaagaucgaaugcuucgacagcgucgaaaucagcggagucgaagacagauucaacgcaagccugggaacauaccacgaccugcugaagaucaucaaggacaaggacuuccuggacaacgaagaaaacgaagacauccuggaagacaucguccugacacugacacuguucgaagacagagaaaugaucgaagaaagacugaagacauacgcacaccuguucgacgacaaggucaugaagcagcugaagagaagaagauacacaggauggggaagacugagcagaaagcugaucaacggaaucagagacaagcagagcggaaagacaauccuggacuuccugaagagcgacggauucgcaaacagaaacuucaugcagcugauccacgacgacagccugacauucaaggaagacauccagaaggcacaggucagcggacagggagacagccugcacgaacacaucgcaaaccuggcaggaagcccggcaaucaagaagggaauccugcagacagucaaggucgucgacgaacuggucaaggucaugggaagacacaagccggaaaacaucgucaucgaaauggcaagagaaaaccagacaacacagaagggacagaagaacagcagagaaagaaugaagagaaucgaagaaggaaucaaggaacugggaagccagauccugaaggaacacccggucgaaaacacacagcugcagaacgaaaagcuguaccuguacuaccugcagaacggaagagacauguacgucgaccaggaacuggacaucaacagacugagcgacuacgacgucgacgcaaucgucccgcagagcuuccugaaggacgacagcaucgacaacaagguccugacaagaagcgacaagaacagaggaaagagcgacaacgucccgagcgaagaagucgucaagaagaugaagaacuacuggagacagcugcugaacgcaaagcugaucacacagagaaaguucgacaaccugacaaaggcagagagaggaggacugagcgaacuggacaaggcaggauucaucaagagacagcuggucgaaacaagacagaucacaaagcacgucgcacagauccuggacagcagaaugaacacaaaguacgacgaaaacgacaagcugaucagagaagucaaggucaucacacugaagagcaagcuggucagcgacuucagaaaggacuuccaguucuacaaggucagagaaaucaacaacuaccaccacgcacacgacgcauaccugaacgcagucgucggaacagcacugaucaagaaguacccgaagcuggaaagcgaauucgucuacggagacuacaaggucuacgacgucagaaagaugaucgcaaagagcgaacaggaaaucggaaaggcaacagcaaaguacuucuucuacagcaacaucaugaacuucuucaagacagaaaucacacuggcaaacggagaaaucagaaagagaccgcugaucgaaacaaacggagaaacaggagaaaucgucugggacaagggaagagacuucgcaacagucagaaagguccugagcaugccgcaggucaacaucgucaagaagacagaaguccagacaggaggauucagcaaggaaagcauccugccgaagagaaacagcgacaagcugaucgcaagaaagaaggacugggacccgaagaaguacggaggauucgacagcccgacagucgcauacagcguccuggucgucgcaaaggucgaaaagggaaagagcaagaagcugaagagcgucaaggaacugcugggaaucacaaucauggaaagaagcagcuucgaaaagaacccgaucgacuuccuggaagcaaagggauacaaggaagucaagaaggaccugaucaucaagcugccgaaguacagccuguucgaacuggaaaacggaagaaagagaaugcuggcaagcgcaggagaacugcagaagggaaacgaacuggcacugccgagcaaguacgucaacuuccuguaccuggcaagccacuacgaaaagcugaagggaagcccggaagacaacgaacagaagcagcuguucgucgaacagcacaagcacuaccuggacgaaaucaucgaacagaucagcgaauucagcaagagagucauccuggcagacgcaaaccuggacaagguccugagcgcauacaacaagcacagagacaagccgaucagagaacaggcagaaaacaucauccaccuguucacacugacaaaccugggagcaccggcagcauucaaguacuucgacacaacaaucgacagaaagagauacacaagcacaaaggaaguccuggacgcaacacugauccaccagagcaucacaggacuguacgaaacaagaaucgaccugagccagcugggaggagacggaagcggaagcccgaagaagaagagaaaggucgacggaagcccgaagaagaagagaaaggucgacagcggauag

SEQ ID NO: 1122 - RNA, 4173 nt, Artificial Sequence
  Synthetic
gacaagaaguacagcaucggacuggcaaucggaacaaacagcgucggaugggcagucaucacagacgaauacaaggucccgagcaagaaguucaagguccugggaaacacagacagacacagcaucaagaagaaccugaucggagcacugcuguucgacagcggagaaacagcagaagcaacaagacugaagagaacagcaagaagaagauacacaagaagaaagaacagaaucugcuaccugcaggaaaucuucagcaacgaaauggcaaaggucgacgacagcuucuuccacagacuggaagaaagcuuccuggucgaagaagacaagaagcacgaaagacacccgaucuucggaaacaucgucgacgaagucgcauaccacgaaaaguacccgacaaucuaccaccugagaaagaagcuggucgacagcacagacaaggcagaccugagacugaucuaccuggcacuggcacacaugaucaaguucagaggacacuuccugaucgaaggagaccugaacccggacaacagcgacgucgacaagcuguucauccagcugguccagacauacaaccagcuguucgaagaaaacccgaucaacgcaagcggagucgacgcaaaggcaauccugagcgcaagacugagcaagagcagaagacuggaaaaccugaucgcacagcugccgggagaaaagaagaacggacuguucggaaaccugaucgcacugagccugggacugacaccgaacuucaagagcaacuucgaccuggcagaagacgcaaagcugcagcugagcaaggacacauacgacgacgaccuggacaaccugcuggcacagaucggagaccaguacgcagaccuguuccuggcagcaaagaaccugagcgacgcaauccugcugagcgacauccugagagucaacacagaaaucacaaaggcaccgcugagcgcaagcaugaucaagagauacgacgaacaccaccaggaccugacacugcugaaggcacuggucagacagcagcugccggaaaaguacaaggaaaucuucuucgaccagagcaagaacggauacgcaggauacaucgacggaggagcaagccaggaagaauucuacaaguucaucaagccgauccuggaaaagauggacggaacagaagaacugcuggucaagcugaacagagaagaccugcugagaaagcagagaacauucgacaacggaagcaucccgcaccagauccaccugggagaacugcacgcaauccugagaagacaggaagacuucuacccguuccugaaggacaacagagaaaagaucgaaaagauccugacauucagaaucccguacuacgucggaccgcuggcaagaggaaacagcagauucgcauggaugacaagaaagagcgaagaaacaaucacaccguggaacuucgaagaagucgucgacaagggagcaagcgcacagagcuucaucgaaagaaugacaaacuucgacaagaaccugccgaacgaaaagguccugccgaagcacagccugcuguacgaauacuucacagucuacaacgaacugacaaaggucaaguacgucacagaaggaaugagaaagccggcauuccugagcggagaacagaagaaggcaaucgucgaccugcuguucaagacaaacagaaaggucacagucaagcagcugaaggaagacuacuucaagaagaucgaaugcuucgacagcgucgaaaucagcggagucgaagacagauucaacgcaagccugggaacauaccacgaccugcugaagaucaucaaggacaaggacuuccuggacaacgaagaaaacgaagacauccuggaagacaucguccugacacugacacuguucgaagacagagaaaugaucgaagaaagacugaagacauacgcacaccuguucgacgacaaggucaugaagcagcugaagagaagaagauacacaggauggggaagacugagcagaaagcugaucaacggaaucagagacaagcagagcggaaagacaauccuggacuuccugaagagcgacggauucgcaaacagaaacuucaugcagcugauccacgacgacagccugacauucaaggaagacauccagaaggcacaggucagcggacagggagacagccugcacgaacacaucgcaaaccuggcaggaagcccggcaaucaagaagggaauccugcagacagucaaggucgucgacgaacuggucaaggucaugggaagacacaagccggaaaacaucgucaucgaaauggcaagagaaaaccagacaacacagaagggacagaagaacagcagagaaagaaugaagagaaucgaagaaggaaucaaggaacugggaagccagauccugaaggaacacccggucgaaaacacacagcugcagaacgaaaagcuguaccuguacuaccugcagaacggaagagacauguacgucgaccaggaacuggacaucaacagacugagcgacuacgacgucgacgcaaucgucccgcagagcuuccugaaggacgacagcaucgacaacaagguccugacaagaagcgacaagaacagaggaaagagcgacaacgucccgagcgaagaagucgucaagaagaugaagaacuacuggagacagcugcugaacgcaaagcugaucacacagagaaaguucgacaaccugacaaaggcagagagaggaggacugagcgaacuggacaaggcaggauucaucaagagacagcuggucgaaacaagacagaucacaaagcacgucgcacagauccuggacagcagaaugaacacaaaguacgacgaaaacgacaagcugaucagagaagucaaggucaucacacugaagagcaagcuggucagcgacuucagaaaggacuuccaguucuacaaggucagagaaaucaacaacuaccaccacgcacacgacgcauaccugaacgcagucgucggaacagcacugaucaagaaguacccgaagcuggaaagcgaauucgucuacggagacuacaaggucuacgacgucagaaagaugaucgcaaagagcgaacaggaaaucggaaaggcaacagcaaaguacuucuucuacagcaacaucaugaacuucuucaagacagaaaucacacuggcaaacggagaaaucagaaagagaccgcugaucgaaacaaacggagaaacaggagaaaucgucugggacaagggaagagacuucgcaacagucagaaagguccugagcaugccgcaggucaacaucgucaagaagacagaaguccagacaggaggauucagcaaggaaagcauccugccgaagagaaacagcgacaagcugaucgcaagaaagaaggacugggacccgaagaaguacggaggauucgacagcccgacagucgcauacagcguccuggucgucgcaaaggucgaaaagggaaagagcaagaagcugaagagcgucaaggaacugcugggaaucacaaucauggaaagaagcagcuucgaaaagaacccgaucgacuuccuggaagcaaagggauacaaggaagucaagaaggaccugaucaucaagcugccgaaguacagccuguucgaacuggaaaacggaagaaagagaaugcuggcaagcgcaggagaacugcagaagggaaacgaacuggcacugccgagcaaguacgucaacuuccuguaccuggcaagccacuacgaaaagcugaagggaagcccggaagacaacgaacagaagcagcuguucgucgaacagcacaagcacuaccuggacgaaaucaucgaacagaucagcgaauucagcaagagagucauccuggcagacgcaaaccuggacaagguccugagcgcauacaacaagcacagagacaagccgaucagagaacaggcagaaaacaucauccaccuguucacacugacaaaccugggagcaccggcagcauucaaguacuucgacacaacaaucgacagaaagagauacacaagcacaaaggaaguccuggacgcaacacugauccaccagagcaucacaggacuguacgaaacaagaaucgaccugagccagcugggaggagacggaagcggaagcccgaagaagaagagaaaggucgacggaagcccgaagaagaagagaaaggucgacagcgga

SEQ ID NO: 1123 - DNA, 4411 bp, Artificial Sequence; identical to SEQ ID NO: 1101
  Synthetic

SEQ ID NO: 1124 - DNA, 4405 bp, Artificial Sequence
  Synthetic
gggtcccgcagtcggcgtccagcggctctgcttgttcgtgtgtgtgtcgttgcaggccttattcggatccatggacaagaagtacagcatcggactggacatcggaacaaacagcgtcggatgggcagtcatcacagacgaatacaaggtcccgagcaagaagttcaaggtcctgggaaacacagacagacacagcatcaagaagaacctgatcggagcactgctgttcgacagcggagaaacagcagaagcaacaagactgaagagaacagcaagaagaagatacacaagaagaaagaacagaatctgctacctgcaggaaatcttcagcaacgaaatggcaaaggtcgacgacagcttcttccacagactggaagaaagcttcctggtcgaagaagacaagaagcacgaaagacacccgatcttcggaaacatcgtcgacgaagtcgcataccacgaaaagtacccgacaatctaccacctgagaaagaagctggtcgacagcacagacaaggcagacctgagactgatctacctggcactggcacacatgatcaagttcagaggacacttcctgatcgaaggagacctgaacccggacaacagcgacgtcgacaagctgttcatccagctggtccagacatacaaccagctgttcgaagaaaacccgatcaacgcaagcggagtcgacgcaaaggcaatcctgagcgcaagactgagcaagagcagaagactggaaaacctgatcgcacagctgccgggagaaaagaagaacggactgttcggaaacctgatcgcactgagcctgggactgacaccgaacttcaagagcaacttcgacctggcagaagacgcaaagctgcagctgagcaaggacacatacgacgacgacctggacaacctgctggcacagatcggagaccagtacgcagacctgttcctggcagcaaagaacctgagcgacgcaatcctgctgagcgacatcctgagagtcaacacagaaatcacaaaggcaccgctgagcgcaagcatgatcaagagatacgacgaacaccaccaggacctgacactgctgaaggcactggtcagacagcagctgccggaaaagtacaaggaaatcttcttcgaccagagcaagaacggatacgcaggatacatcgacggaggagcaagccaggaagaattctacaagttcatcaagccgatcctggaaaagatggacggaacagaagaactgctggtcaagctgaacagagaagacctgctgagaaagcagagaacattcgacaacggaagcatcccgcaccagatccacctgggagaactgcacgcaatcctgagaagacaggaagacttctacccgttcctgaaggacaacagagaaaagatcgaaaagatcctgacattcagaatcccgtactacgtcggaccgctggcaagaggaaacagcagattcgcatggatgacaagaaagagcgaagaaacaatcacaccgtggaacttcgaagaagtcgtcgacaagggagcaagcgcacagagcttcatcgaaagaatgacaaacttcgacaagaacctgccgaacgaaaaggtcctgccgaagcacagcctgctgtacgaatacttcacagtctacaacgaactgacaaaggtcaagtacgtcacagaaggaatgagaaagccggcattcctgagcggagaacagaagaaggcaatcgtcgacctgctgttcaagacaaacagaaaggtcacagtcaagcagctgaaggaagactacttcaagaagatcgaatgcttcgacagcgtcgaaatcagcggagtcgaagacagattcaacgcaagcctgggaacataccacgacctgctgaagatcatcaaggacaaggacttcctggacaacgaagaaaacgaagacatcctggaagacatcgtcctgacactgacactgttcgaagacagagaaatgatcgaagaaagactgaagacatacgcacacctgttcgacgacaaggtcatgaagcagctgaagagaagaagatacacaggatggggaagactgagcagaaagctgatcaacggaatcagagacaagcagagcggaaagacaatcctggacttcctgaagagcgacggattcgcaaacagaaacttcatgcagctgatccacgacgacagcctgacattcaaggaagacatccagaaggcacaggtcagcggacagggagacagcctgcacgaacacatcgcaaacctggcaggaagcccggcaatcaagaagggaatcctgcagacagtcaaggtcgtcgacgaactggtcaaggtcatgggaagacacaagccggaaaacatcgtcatcgaaatggcaagagaaaaccagacaacacagaagggacagaagaacagcagagaaagaatgaagagaatcgaagaaggaatcaaggaactgggaagccagatcctgaaggaacacccggtcgaaaacacacagctgcagaacgaaaagctgtacctgtactacctgcagaacggaagagacatgtacgtcgaccaggaactggacatcaacagactgagcgactacgacgtcgaccacatcgtcccgcagagcttcctgaaggacgacagcatcgacaacaaggtcctgacaagaagcgacaagaacagaggaaagagcgacaacgtcccgagcgaagaagtcgtcaagaagatgaagaactactggagacagctgctgaacgcaaagctgatcacacagagaaagttcgacaacctgacaaaggcagagagaggaggactgagcgaactggacaaggcaggattcatcaagagacagctggtcgaaacaagacagatcacaaagcacgtcgcacagatcctggacagcagaatgaacacaaagtacgacgaaaacgacaagctgatcagagaagtcaaggtcatcacactgaagagcaagctggtcagcgacttcagaaaggacttccagttctacaaggtcagagaaatcaacaactaccaccacgcacacgacgcatacctgaacgcagtcgtcggaacagcactgatcaagaagtacccgaagctggaaagcgaattcgtctacggagactacaaggtctacgacgtcagaaagatgatcgcaaagagcgaacaggaaatcggaaaggcaacagcaaagtacttcttctacagcaacatcatgaacttcttcaagacagaaatcacactggcaaacggagaaatcagaaagagaccgctgatcgaaacaaacggagaaacaggagaaatcgtctgggacaagggaagagacttcgcaacagtcagaaaggtcctgagcatgccgcaggtcaacatcgtcaagaagacagaagtccagacaggaggattcagcaaggaaagcatcctgccgaagagaaacagcgacaagctgatcgcaagaaagaaggactgggacccgaagaagtacggaggattcgacagcccgacagtcgcatacagcgtcctggtcgtcgcaaaggtcgaaaagggaaagagcaagaagctgaagagcgtcaaggaactgctgggaatcacaatcatggaaagaagcagcttcgaaaagaacccgatcgacttcctggaagcaaagggatacaaggaagtcaagaaggacctgatcatcaagctgccgaagtacagcctgttcgaactggaaaacggaagaaagagaatgctggcaagcgcaggagaactgcagaagggaaacgaactggcactgccgagcaagtacgtcaacttcctgtacctggcaagccactacgaaaagctgaagggaagcccggaagacaacgaacagaagcagctgttcgtcgaacagcacaagcactacctggacgaaatcatcgaacagatcagcgaattcagcaagagagtcatcctggcagacgcaaacctggacaaggtcctgagcgcatacaacaagcacagagacaagccgatcagagaacaggcagaaaacatcatccacctgttcacactgacaaacctgggagcaccggcagcattcaagtacttcgacacaacaatcgacagaaagagatacacaagcacaaaggaagtcctggacgcaacactgatccaccagagcatcacaggactgtacgaaacaagaatcgacctgagccagctgggaggagacggaggaggaagcccgaagaagaagagaaaggtctagctagccatcacatttaaaagcatctcagcctaccatgagaataagagaaagaaaatgaagatcaatagcttattcatctctttttctttttcgttggtgtaaagccaacaccctgtctaaaaaacataaatttctttaatcattttgcctcttttctctgtgcttcaattaataaaaaatggaaagaacctcgag

SEQ ID NO: 1125 - DNA, 4140 bp, Artificial Sequence
  Synthetic
atggacaagaagtacagcatcggactggacatcggaacaaacagcgtcggatgggcagtcatcacagacgaatacaaggtcccgagcaagaagttcaaggtcctgggaaacacagacagacacagcatcaagaagaacctgatcggagcactgctgttcgacagcggagaaacagcagaagcaacaagactgaagagaacagcaagaagaagatacacaagaagaaagaacagaatctgctacctgcaggaaatcttcagcaacgaaatggcaaaggtcgacgacagcttcttccaccggctggaagaaagcttcctggtcgaagaagacaagaagcacgaaagacacccgatcttcggaaacatcgtcgacgaagtcgcataccacgaaaagtacccgacaatctaccacctgagaaagaagctggtcgacagcacagacaaggcagacctgagactgatctacctggcactggcacacatgatcaagttcagaggacacttcctgatcgaaggagacctgaacccggacaacagcgacgtcgacaagctgttcatccagctggtccagacatacaaccagctgttcgaagaaaacccgatcaacgcaagcggagtcgacgcaaaggcaatcctgagcgcaagactgagcaagagcagaagactggaaaacctgatcgcacagctgccgggagaaaagaagaacggactgttcggaaacctgatcgcactgagcctgggactgacaccgaacttcaagagcaacttcgacctggcagaagacgcaaagctgcagctgagcaaggacacatacgacgacgacctggacaacctgctggcacagatcggagaccagtacgcagacctgttcctggcagcaaagaacctgagcgacgcaatcctgctgagcgacatcctgagagtcaacacagaaatcacaaaggcaccgctgagcgcaagcatgatcaagagatacgacgaacaccaccaggacctgacactgctgaaggcactggtcagacagcagctgccggaaaagtacaaggaaatcttcttcgaccagagcaagaacggatacgcaggatacatcgacggaggagcaagccaggaagaattctacaagttcatcaagccgatcctggaaaagatggacggaacagaagaactgctggtcaagctgaacagagaagacctgctgagaaagcagagaacattcgacaacggaagcatcccgcaccagatccacctgggagaactgcacgcaatcctgagaagacaggaagacttctacccgttcctgaaggacaacagagaaaagatcgaaaagatcctgacattcagaatcccgtactacgtcggaccgctggcaagaggaaacagcagattcgcatggatgacaagaaagagcgaagaaacaatcacaccgtggaacttcgaagaagtcgtcgacaagggagcaagcgcacagagcttcatcgaaagaatgacaaacttcgacaagaacctgccgaacgaaaaggtcctgccgaagcacagcctgctgtacgaatacttcacagtctacaacgaactgacaaaggtcaagtacgtcacagaaggaatgagaaagccggcattcctgagcggagaacagaagaaggcaatcgtcgacctgctgttcaagacaaacagaaaggtcacagtcaagcagctgaaggaagactacttcaagaagatcgaatgcttcgacagcgtcgaaatcagcggagtcgaagacagattcaacgcaagcctgggaacataccacgacctgctgaagatcatcaaggacaaggacttcctggacaacgaagaaaacgaagacatcctggaagacatcgtcctgacactgacactgttcgaagacagagaaatgatcgaagaaagactgaagacatacgcacacctgttcgacgacaaggtcatgaagcagctgaagagaagaagatacacaggatggggaagactgagcagaaagctgatcaacggaatcagagacaagcagagcggaaagacaatcctggacttcctgaagagcgacggattcgcaaacagaaacttcatgcagctgatccacgacgacagcctgacattcaaggaagacatccagaaggcacaggtcagcggacagggagacagcctgcacgaacacatcgcaaacctggcaggaagcccggcaatcaagaagggaatcctgcagacagtcaaggtcgtcgacgaactggtcaaggtcatgggaagacacaagccggaaaacatcgtcatcgaaatggcaagagaaaaccagacaacacagaagggacagaagaacagcagagaaagaatgaagagaatcgaagaaggaatcaaggaactgggaagccagatcctgaaggaacacccggtcgaaaacacacagctgcagaacgaaaagctgtacctgtactacctgcaaaacggaagagacatgtacgtcgaccaggaactggacatcaacagactgagcgactacgacgtcgaccacatcgtcccgcagagcttcctgaaggacgacagcatcgacaacaaggtcctgacaagaagcgacaagaacagaggaaagagcgacaacgtcccgagcgaagaagtcgtcaagaagatgaagaactactggagacagctgctgaacgcaaagctgatcacacagagaaagttcgacaacctgacaaaggcagagagaggaggactgagcgaactggacaaggcaggattcatcaagagacagctggtcgaaacaagacagatcacaaagcacgtcgcacagatcctggacagcagaatgaacacaaagtacgacgaaaacgacaagctgatcagagaagtcaaggtcatcacactgaagagcaagctggtcagcgacttcagaaaggacttccagttctacaaggtcagagaaatcaacaactaccaccacgcacacgacgcatacctgaacgcagtcgtcggaacagcactgatcaagaagtacccgaagctggaaagcgaattcgtctacggagactacaaggtctacgacgtcagaaagatgatcgcaaagagcgaacaggaaatcggaaaggcaacagcaaagtacttcttctacagcaacatcatgaacttcttcaagacagaaatcacactggcaaacggagaaatcagaaagagaccgctgatcgaaacaaacggagaaacaggagaaatcgtctgggacaagggaagagacttcgcaacagtcagaaaggtcctgagcatgccgcaggtcaacatcgtcaagaagacagaagtccagacaggaggattcagcaaggaaagcatcctgccgaagagaaacagcgacaagctgatcgcaagaaagaaggactgggacccgaagaagtacggaggattcgacagcccgacagtcgcatacagcgtcctggtcgtcgcaaaggtcgaaaagggaaagagcaagaagctgaagagcgtcaaggaactgctgggaatcacaatcatggaaagaagcagcttcgaaaagaacccgatcgacttcctggaagcaaagggatacaaggaagtcaagaaggacctgatcatcaagctgccgaagtacagcctgttcgaactggaaaacggaagaaagagaatgctggcaagcgcaggagaactgcagaagggaaacgaactggcactgccgagcaagtacgtcaacttcctgtacctggcaagccactacgaaaagctgaagggaagcccggaagacaacgaacagaagcagctgttcgtcgaacagcacaagcactacctggacgaaatcatcgaacagatcagcgaattcagcaagagagtcatcctggcagacgcaaacctggacaaggtcctgagcgcatacaacaagcacagagacaagccgatcagagaacaggcagaaaacatcatccacctgttcacactgacaaacctgggagcaccggcagcattcaagtacttcgacacaacaatcgacagaaagagatacacaagcacaaaggaagtcctggacgcaacactgatccaccagagcatcacaggactgtacgaaacaagaatcgacctgagccagctgggaggagacggaggaggaagcccgaagaagaagagaaaggtctag

SEQ ID NO: 1126 - DNA, 4140 bp, Artificial Sequence
  Synthetic
atggacaagaagtacagcatcggcctggacatcggcaccaacagcgtgggctgggccgtgatcaccgacgagtacaaggtgcccagcaagaagttcaaggtgctgggcaacaccgacagacacagcatcaagaagaacctgatcggcgccctgctgttcgacagcggcgagaccgccgaggccaccagactgaagagaaccgccagaagaagatacaccagaagaaagaacagaatctgctacctgcaggagatcttcagcaacgagatggccaaggtggacgacagcttcttccacagactggaggagagcttcctggtggaggaggacaagaagcacgagagacaccccatcttcggcaacatcgtggacgaggtggcctaccacgagaagtaccccaccatctaccacctgagaaagaagctggtggacagcaccgacaaggccgacctgagactgatctacctggccctggcccacatgatcaagttcagaggccacttcctgatcgagggcgacctgaaccccgacaacagcgacgtggacaagctgttcatccagctggtgcagacctacaaccagctgttcgaggagaaccccatcaacgccagcggcgtggacgccaaggccatcctgagcgccagactgagcaagagcagaagactggagaacctgatcgcccagctgcccggcgagaagaagaacggcctgttcggcaacctgatcgccctgagcctgggcctgacccccaacttcaagagcaacttcgacctggccgaggacgccaagctgcagctgagcaaggacacctacgacgacgacctggacaacctgctggcccagatcggcgaccagtacgccgacctgttcctggccgccaagaacctgagcgacgccatcctgctgagcgacatcctgagagtgaacaccgagatcaccaaggcccccctgagcgccagcatgatcaagagatacgacgagcaccaccaggacctgaccctgctgaaggccctggtgagacagcagctgcccgagaagtacaaggagatcttcttcgaccagagcaagaacggctacgccggctacatcgacggcggcgccagccaggaggagttctacaagttcatcaagcccatcctggagaagatggacggcaccgaggagctgctggtgaagctgaacagagaggacctgctgagaaagcagagaaccttcgacaacggcagcatcccccaccagatccacctgggcgagctgcacgccatcctgagaagacaggaggacttctaccccttcctgaaggacaacagagagaagatcgagaagatcctgaccttcagaatcccctactacgtgggccccctggccagaggcaacagcagattcgcctggatgaccagaaagagcgaggagaccatcaccccctggaacttcgaggaggtggtggacaagggcgccagcgcccagagcttcatcgagagaatgaccaacttcgacaagaacctgcccaacgagaaggtgctgcccaagcacagcctgctgtacgagtacttcaccgtgtacaacgagctgaccaaggtgaagtacgtgaccgagggcatgagaaagcccgccttcctgagcggcgagcagaagaaggccatcgtggacctgctgttcaagaccaacagaaaggtgaccgtgaagcagctgaaggaggactacttcaagaagatcgagtgcttcgacagcgtggagatcagcggcgtggaggacagattcaacgccagcctgggcacctaccacgacctgctgaagatcatcaaggacaaggacttcctggacaacgaggagaacgaggacatcctggaggacatcgtgctgaccctgaccctgttcgaggacagagagatgatcgaggagagactgaagacctacgcccacctgttcgacgacaaggtgatgaagcagctgaagagaagaagatacaccggctggggcagactgagcagaaagctgatcaacggcatcagagacaagcagagcggcaagaccatcctggacttcctgaagagcgacggcttcgccaacagaaacttcatgcagctgatccacgacgacagcctgaccttcaaggaggacatccagaaggcccaggtgagcggccagggcgacagcctgcacgagcacatcgccaacctggccggcagccccgccatcaagaagggcatcctgcagaccgtgaaggtggtggacgagctggtgaaggtgatgggcagacacaagcccgagaacatcgtgatcgagatggccagagagaaccagaccacccagaagggccagaagaacagcagagagagaatgaagagaatcgaggagggcatcaaggagctgggcagccagatcctgaaggagcaccccgtggagaacacccagctgcagaacgagaagctgtacctgtactacctgcagaacggcagagacatgtacgtggaccaggagctggacatcaacagactgagcgactacgacgtggaccacatcgtgccccagagcttcctgaaggacgacagcatcgacaacaaggtgctgaccagaagcgacaagaacagaggcaagagcgacaacgtgcccagcgaggaggtggtgaagaagatgaagaactactggagacagctgctgaacgccaagctgatcacccagagaaagttcgacaacctgaccaaggccgagagaggcggcctgagcgagctggacaaggccggcttcatcaagagacagctggtggagaccagacagatcaccaagcacgtggcccagatcctggacagcagaatgaacaccaagtacgacgagaacgacaagctgatcagagaggtgaaggtgatcaccctgaagagcaagctggtgagcgacttcagaaaggacttccagttctacaaggtgagagagatcaacaactaccaccacgcccacgacgcctacctgaacgccgtggtgggcaccgccctgatcaagaagtaccccaagctggagagcgagttcgtgtacggcgactacaaggtgtacgacgtgagaaagatgatcgccaagagcgagcaggagatcggcaaggccaccgccaagtacttcttctacagcaacatcatgaacttcttcaagaccgagatcaccctggccaacggcgagatcagaaagagacccctgatcgagaccaacggcgagaccggcgagatcgtgtgggacaagggcagagacttcgccaccgtgagaaaggtgctgagcatgccccaggtgaacatcgtgaagaagaccgaggtgcagaccggcggcttcagcaaggagagcatcctgcccaagagaaacagcgacaagctgatcgccagaaagaaggactgggaccccaagaagtacggcggcttcgacagccccaccgtggcctacagcgtgctggtggtggccaaggtggagaagggcaagagcaagaagctgaagagcgtgaaggagctgctgggcatcaccatcatggagagaagcagcttcgagaagaaccccatcgacttcctggaggccaagggctacaaggaggtgaagaaggacctgatcatcaagctgcccaagtacagcctgttcgagctggagaacggcagaaagagaatgctggccagcgccggcgagctgcagaagggcaacgagctggccctgcccagcaagtacgtgaacttcctgtacctggccagccactacgagaagctgaagggcagccccgaggacaacgagcagaagcagctgttcgtggagcagcacaagcactacctggacgagatcatcgagcagatcagcgagttcagcaagagagtgatcctggccgacgccaacctggacaaggtgctgagcgcctacaacaagcacagagacaagcccatcagagagcaggccgagaacatcatccacctgttcaccctgaccaacctgggcgcccccgccgccttcaagtacttcgacaccaccatcgacagaaagagatacaccagcaccaaggaggtgctggacgccaccctgatccaccagagcatcaccggcctgtacgagaccagaatcgacctgagccagctgggcggcgacggcggcggcagccccaagaagaagagaaaggtgtga

SEQ ID NO: 1127 - DNA, 4411 bp, Artificial Sequence
  Synthetic
gggtcccgcagtcggcgtccagcggctctgcttgttcgtgtgtgtgtcgttgcaggccttattcggatccgccaccatggacaagaagtacagcatcggcctggacatcggcaccaacagcgtgggctgggccgtgatcaccgacgagtacaaggtgcccagcaagaagttcaaggtgctgggcaacaccgacagacacagcatcaagaagaacctgatcggcgccctgctgttcgacagcggcgagaccgccgaggccaccagactgaagagaaccgccagaagaagatacaccagaagaaagaacagaatctgctacctgcaggagatcttcagcaacgagatggccaaggtggacgacagcttcttccacagactggaggagagcttcctggtggaggaggacaagaagcacgagagacaccccatcttcggcaacatcgtggacgaggtggcctaccacgagaagtaccccaccatctaccacctgagaaagaagctggtggacagcaccgacaaggccgacctgagactgatctacctggccctggcccacatgatcaagttcagaggccacttcctgatcgagggcgacctgaaccccgacaacagcgacgtggacaagctgttcatccagctggtgcagacctacaaccagctgttcgaggagaaccccatcaacgccagcggcgtggacgccaaggccatcctgagcgccagactgagcaagagcagaagactggagaacctgatcgcccagctgcccggcgagaagaagaacggcctgttcggcaacctgatcgccctgagcctgggcctgacccccaacttcaagagcaacttcgacctggccgaggacgccaagctgcagctgagcaaggacacctacgacgacgacctggacaacctgctggcccagatcggcgaccagtacgccgacctgttcctggccgccaagaacctgagcgacgccatcctgctgagcgacatcctgagagtgaacaccgagatcaccaaggcccccctgagcgccagcatgatcaagagatacgacgagcaccaccaggacctgaccctgctgaaggccctggtgagacagcagctgcccgagaagtacaaggagatcttcttcgaccagagcaagaacggctacgccggctacatcgacggcggcgccagccaggaggagttctacaagttcatcaagcccatcctggagaagatggacggcaccgaggagctgctggtgaagctgaacagagaggacctgctgagaaagcagagaaccttcgacaacggcagcatcccccaccagatccacctgggcgagctgcacgccatcctgagaagacaggaggacttctaccccttcctgaaggacaacagagagaagatcgagaagatcctgaccttcagaatcccctactacgtgggccccctggccagaggcaacagcagattcgcctggatgaccagaaagagcgaggagaccatcaccccctggaacttcgaggaggtggtggacaagggcgccagcgcccagagcttcatcgagagaatgaccaacttcgacaagaacctgcccaacgagaaggtgctgcccaagcacagcctgctgtacgagtacttcaccgtgtacaacgagctgaccaaggtgaagtacgtgaccgagggcatgagaaagcccgccttcctgagcggcgagcagaagaaggccatcgtggacctgctgttcaagaccaacagaaaggtgaccgtgaagcagctgaaggaggactacttcaagaagatcgagtgcttcgacagcgtggagatcagcggcgtggaggacagattcaacgccagcctgggcacctaccacgacctgctgaagatcatcaaggacaaggacttcctggacaacgaggagaacgaggacatcctggaggacatcgtgctgaccctgaccctgttcgaggacagagagatgatcgaggagagactgaagacctacgcccacctgttcgacgacaaggtgatgaagcagctgaagagaagaagatacaccggctggggcagactgagcagaaagctgatcaacggcatcagagacaagcagagcggcaagaccatcctggacttcctgaagagcgacggcttcgccaacagaaacttcatgcagctgatccacgacgacagcctgaccttcaaggaggacatccagaaggcccaggtgagcggccagggcgacagcctgcacgagcacatcgccaacctggccggcagccccgccatcaagaagggcatcctgcagaccgtgaaggtggtggacgagctggtgaaggtgatgggcagacacaagcccgagaacatcgtgatcgagatggccagagagaaccagaccacccagaagggccagaagaacagcagagagagaatgaagagaatcgaggagggcatcaaggagctgggcagccagatcctgaaggagcaccccgtggagaacacccagctgcagaacgagaagctgtacctgtactacctgcagaacggcagagacatgtacgtggaccaggagctggacatcaacagactgagcgactacgacgtggaccacatcgtgccccagagcttcctgaaggacgacagcatcgacaacaaggtgctgaccagaagcgacaagaacagaggcaagagcgacaacgtgcccagcgaggaggtggtgaagaagatgaagaactactggagacagctgctgaacgccaagctgatcacccagagaaagttcgacaacctgaccaaggccgagagaggcggcctgagcgagctggacaaggccggcttcatcaagagacagctggtggagaccagacagatcaccaagcacgtggcccagatcctggacagcagaatgaacaccaagtacgacgagaacgacaagctgatcagagaggtgaaggtgatcaccctgaagagcaagctggtgagcgacttcagaaaggacttccagttctacaaggtgagagagatcaacaactaccaccacgcccacgacgcctacctgaacgccgtggtgggcaccgccctgatcaagaagtaccccaagctggagagcgagttcgtgtacggcgactacaaggtgtacgacgtgagaaagatgatcgccaagagcgagcaggagatcggcaaggccaccgccaagtacttcttctacagcaacatcatgaacttcttcaagaccgagatcaccctggccaacggcgagatcagaaagagacccctgatcgagaccaacggcgagaccggcgagatcgtgtgggacaagggcagagacttcgccaccgtgagaaaggtgctgagcatgccccaggtgaacatcgtgaagaagaccgaggtgcagaccggcggcttcagcaaggagagcatcctgcccaagagaaacagcgacaagctgatcgccagaaagaaggactgggaccccaagaagtacggcggcttcgacagccccaccgtggcctacagcgtgctggtggtggccaaggtggagaagggcaagagcaagaagctgaagagcgtgaaggagctgctgggcatcaccatcatggagagaagcagcttcgagaagaaccccatcgacttcctggaggccaagggctacaaggaggtgaagaaggacctgatcatcaagctgcccaagtacagcctgttcgagctggagaacggcagaaagagaatgctggccagcgccggcgagctgcagaagggcaacgagctggccctgcccagcaagtacgtgaacttcctgtacctggccagccactacgagaagctgaagggcagccccgaggacaacgagcagaagcagctgttcgtggagcagcacaagcactacctggacgagatcatcgagcagatcagcgagttcagcaagagagtgatcctggccgacgccaacctggacaaggtgctgagcgcctacaacaagcacagagacaagcccatcagagagcaggccgagaacatcatccacctgttcaccctgaccaacctgggcgcccccgccgccttcaagtacttcgacaccaccatcgacagaaagagatacaccagcaccaaggaggtgctggacgccaccctgatccaccagagcatcaccggcctgtacgagaccagaatcgacctgagccagctgggcggcgacggcggcggcagccccaagaagaagagaaaggtgtgactagccatcacatttaaaagcatctcagcctaccatgagaataagagaaagaaaatgaagatcaatagcttattcatctctttttctttttcgttggtgtaaagccaacaccctgtctaaaaaacataaatttctttaatcattttgcctcttttctctgtgcttcaattaataaaaaatggaaagaacctcgag

SEQ ID NO: 1128 - skipped

SEQ ID NO: 1129 - DNA, 4140 bp, Artificial Sequence
  Synthetic
atggacaagaagtactctatcggtttggacatcggtaccaactctgtcggttgggccgtcatcaccgacgaatacaaggtcccatctaagaagttcaaggtcttgggtaacaccgacagacactctatcaagaagaacttgatcggtgccttgttgttcgactctggtgaaaccgccgaagccaccagattgaagagaaccgccagaagaagatacaccagaagaaagaacagaatctgctacttgcaagaaatcttctctaacgaaatggccaaggtcgacgactctttcttccacagattggaagaatctttcttggtcgaagaagacaagaagcacgaaagacacccaatcttcggtaacatcgtcgacgaagtcgcctaccacgaaaagtacccaaccatctaccacttgagaaagaagttggtcgactctaccgacaaggccgacttgagattgatctacttggccttggcccacatgatcaagttcagaggtcacttcttgatcgaaggtgacttgaacccagacaactctgacgtcgacaagttgttcatccaattggtccaaacctacaaccaattgttcgaagaaaacccaatcaacgcctctggtgtcgacgccaaggccatcttgtctgccagattgtctaagagcagaagattggaaaacttgatcgcccaattgccaggtgaaaagaagaacggtttgttcggtaacttgatcgccttgtctttgggtttgaccccaaacttcaagtctaacttcgacttggccgaagacgccaagttgcaattgtctaaggacacctacgacgacgacttggacaacttgttggcccaaatcggtgaccaatacgccgacttgttcttggccgccaagaacttgtctgacgccatcttgttgtctgacatcttgagagtcaacaccgaaatcaccaaggccccattgtctgcctctatgatcaagagatacgacgaacaccaccaagacttgaccttgttgaaggccttggtcagacaacaattgccagaaaagtacaaggaaatcttcttcgaccaatctaagaacggttacgccggttacatcgacggtggtgcctctcaagaagaattctacaagttcatcaagccaatcttggaaaagatggacggtaccgaagaattgttggtcaagttgaacagagaagacttgttgagaaagcaaagaaccttcgacaacggttctatcccacaccaaatccacttgggtgaattgcacgccatcttgagaagacaagaagacttctacccattcttgaaggacaacagagaaaagatcgaaaagatcttgaccttcagaatcccatactacgtcggtccattggccagaggtaacagcagattcgcctggatgaccagaaagtctgaagaaaccatcaccccatggaacttcgaagaagtcgtcgacaagggtgcctctgcccaatctttcatcgaaagaatgaccaacttcgacaagaacttgccaaacgaaaaggtcttgccaaagcactctttgttgtacgaatacttcaccgtctacaacgaattgaccaaggtcaagtacgtcaccgaaggtatgagaaagccagccttcttgtctggtgaacaaaagaaggccatcgtcgacttgttgttcaagaccaacagaaaggtcaccgtcaagcaattgaaggaagactacttcaagaagatcgaatgcttcgactctgtcgaaatctctggtgtcgaagacagattcaacgcctctttgggtacctaccacgacttgttgaagatcatcaaggacaaggacttcttggacaacgaagaaaacgaagacatcttggaagacatcgtcttgaccttgaccttgttcgaagacagagaaatgatcgaagaaagattgaagacctacgcccacttgttcgacgacaaggtcatgaagcaattgaagagaagaagatacaccggttggggtagattgagcagaaagttgatcaacggtatcagagacaagcaatctggtaagaccatcttggacttcttgaagtctgacggtttcgccaacagaaacttcatgcaattgatccacgacgactctttgaccttcaaggaagacatccaaaaggcccaagtctctggtcaaggtgactctttgcacgaacacatcgccaacttggccggttctccagccatcaagaagggtatcttgcaaaccgtcaaggtcgtcgacgaattggtcaaggtcatgggtagacacaagccagaaaacatcgtcatcgaaatggccagagaaaaccaaaccacccaaaagggtcaaaagaacagcagagaaagaatgaagagaatcgaagaaggtatcaaggaattgggttctcaaatcttgaaggaacacccagtcgaaaacacccaattgcaaaacgaaaagttgtacttgtactacttgcaaaacggtagagacatgtacgtcgaccaagaattggacatcaacagattgtctgactacgacgtcgaccacatcgtcccacaatctttcttgaaggacgactctatcgacaacaaggtcttgaccagatctgacaagaacagaggtaagtctgacaacgtcccatctgaagaagtcgtcaagaagatgaagaactactggagacaattgttgaacgccaagttgatcacccaaagaaagttcgacaacttgaccaaggccgaaagaggtggtttgtctgaattggacaaggccggtttcatcaagagacaattggtcgaaaccagacaaatcaccaagcacgtcgcccaaatcttggacagcagaatgaacaccaagtacgacgaaaacgacaagttgatcagagaagtcaaggtcatcaccttgaagtctaagttggtctctgacttcagaaaggacttccaattctacaaggtcagagaaatcaacaactaccaccacgcccacgacgcctacttgaacgccgtcgtcggtaccgccttgatcaagaagtacccaaagttggaatctgaattcgtctacggtgactacaaggtctacgacgtcagaaagatgatcgccaagtctgaacaagaaatcggtaaggccaccgccaagtacttcttctactctaacatcatgaacttcttcaagaccgaaatcaccttggccaacggtgaaatcagaaagagaccattgatcgaaaccaacggtgaaaccggtgaaatcgtctgggacaagggtagagacttcgccaccgtcagaaaggtcttgtctatgccacaagtcaacatcgtcaagaagaccgaagtccaaaccggtggtttctctaaggaatctatcttgccaaagagaaactctgacaagttgatcgccagaaagaaggactgggacccaaagaagtacggtggtttcgactctccaaccgtcgcctactctgtcttggtcgtcgccaaggtcgaaaagggtaagtctaagaagttgaagtctgtcaaggaattgttgggtatcaccatcatggaaagatcttctttcgaaaagaacccaatcgacttcttggaagccaagggttacaaggaagtcaagaaggacttgatcatcaagttgccaaagtactctttgttcgaattggaaaacggtagaaagagaatgttggcctctgccggtgaattgcaaaagggtaacgaattggccttgccatctaagtacgtcaacttcttgtacttggcctctcactacgaaaagttgaagggttctccagaagacaacgaacaaaagcaattgttcgtcgaacaacacaagcactacttggacgaaatcatcgaacaaatctctgaattctctaagagagtcatcttggccgacgccaacttggacaaggtcttgtctgcctacaacaagcacagagacaagccaatcagagaacaagccgaaaacatcatccacttgttcaccttgaccaacttgggtgccccagccgccttcaagtacttcgacaccaccatcgacagaaagagatacacctctaccaaggaagtcttggacgccaccttgatccaccaatctatcaccggtttgtacgaaaccagaatcgacttgtctcaattgggtggtgacggtggtggttctccaaagaagaagagaaaggtctaa

SEQ ID NO: 1130 - DNA, 4140 bp, Artificial Sequence
  Synthetic
atggacaagaagtactccatcggcctggacatcggcaccaactccgtgggctgggccgtgatcaccgacgagtacaaggtgccctccaagaagttcaaggtgctgggcaacaccgaccggcactccatcaagaagaacctgatcggcgccctgctgttcgactccggcgagaccgccgaggccacccggctgaagcggaccgcccggcggcggtacacccggcggaagaaccggatctgctacctgcaggagatcttctccaacgagatggccaaggtggacgactccttcttccaccggctggaggagtccttcctggtggaggaggacaagaagcacgagcggcaccccatcttcggcaacatcgtggacgaggtggcctaccacgagaagtaccccaccatctaccacctgcggaagaagctggtggactccaccgacaaggccgacctgcggctgatctacctggccctggcccacatgatcaagttccggggccacttcctgatcgagggcgacctgaaccccgacaactccgacgtggacaagctgttcatccagctggtgcagacctacaaccagctgttcgaggagaaccccatcaacgcctccggcgtggacgccaaggccatcctgtccgcccggctgtccaagtcccggcggctggagaacctgatcgcccagctgcccggcgagaagaagaacggcctgttcggcaacctgatcgccctgtccctgggcctgacccccaacttcaagtccaacttcgacctggccgaggacgccaagctgcagctgtccaaggacacctacgacgacgacctggacaacctgctggcccagatcggcgaccagtacgccgacctgttcctggccgccaagaacctgtccgacgccatcctgctgtccgacatcctgcgggtgaacaccgagatcaccaaggcccccctgtccgcctccatgatcaagcggtacgacgagcaccaccaggacctgaccctgctgaaggccctggtgcggcagcagctgcccgagaagtacaaggagatcttcttcgaccagtccaagaacggctacgccggctacatcgacggcggcgcctcccaggaggagttctacaagttcatcaagcccatcctggagaagatggacggcaccgaggagctgctggtgaagctgaaccgggaggacctgctgcggaagcagcggaccttcgacaacggctccatcccccaccagatccacctgggcgagctgcacgccatcctgcggcggcaggaggacttctaccccttcctgaaggacaaccgggagaagatcgagaagatcctgaccttccggatcccctactacgtgggccccctggcccggggcaactcccggttcgcctggatgacccggaagtccgaggagaccatcaccccctggaacttcgaggaggtggtggacaagggcgcctccgcccagtccttcatcgagcggatgaccaacttcgacaagaacctgcccaacgagaaggtgctgcccaagcactccctgctgtacgagtacttcaccgtgtacaacgagctgaccaaggtgaagtacgtgaccgagggcatgcggaagcccgccttcctgtccggcgagcagaagaaggccatcgtggacctgctgttcaagaccaaccggaaggtgaccgtgaagcagctgaaggaggactacttcaagaagatcgagtgcttcgactccgtggagatctccggcgtggaggaccggttcaacgcctccctgggcacctaccacgacctgctgaagatcatcaaggacaaggacttcctggacaacgaggagaacgaggacatcctggaggacatcgtgctgaccctgaccctgttcgaggaccgggagatgatcgaggagcggctgaagacctacgcccacctgttcgacgacaaggtgatgaagcagctgaagcggcggcggtacaccggctggggccggctgtcccggaagctgatcaacggcatccgggacaagcagtccggcaagaccatcctggacttcctgaagtccgacggcttcgccaaccggaacttcatgcagctgatccacgacgactccctgaccttcaaggaggacatccagaaggcccaggtgtccggccagggcgactccctgcacgagcacatcgccaacctggccggctcccccgccatcaagaagggcatcctgcagaccgtgaaggtggtggacgagctggtgaaggtgatgggccggcacaagcccgagaacatcgtgatcgagatggcccgggagaaccagaccacccagaagggccagaagaactcccgggagcggatgaagcggatcgaggagggcatcaaggagctgggctcccagatcctgaaggagcaccccgtggagaacacccagctgcagaacgagaagctgtacctgtactacctgcagaacggccgggacatgtacgtggaccaggagctggacatcaaccggctgtccgactacgacgtggaccacatcgtgccccagtccttcctgaaggacgactccatcgacaacaaggtgctgacccggtccgacaagaaccggggcaagtccgacaacgtgccctccgaggaggtggtgaagaagatgaagaactactggcggcagctgctgaacgccaagctgatcacccagcggaagttcgacaacctgaccaaggccgagcggggcggcctgtccgagctggacaaggccggcttcatcaagcggcagctggtggagacccggcagatcaccaagcacgtggcccagatcctggactcccggatgaacaccaagtacgacgagaacgacaagctgatccgggaggtgaaggtgatcaccctgaagtccaagctggtgtccgacttccggaaggacttccagttctacaaggtgcgggagatcaacaactaccaccacgcccacgacgcctacctgaacgccgtggtgggcaccgccctgatcaagaagtaccccaagctggagtccgagttcgtgtacggcgactacaaggtgtacgacgtgcggaagatgatcgccaagtccgagcaggagatcggcaaggccaccgccaagtacttcttctactccaacatcatgaacttcttcaagaccgagatcaccctggccaacggcgagatccggaagcggcccctgatcgagaccaacggcgagaccggcgagatcgtgtgggacaagggccgggacttcgccaccgtgcggaaggtgctgtccatgccccaggtgaacatcgtgaagaagaccgaggtgcagaccggcggcttctccaaggagtccatcctgcccaagcggaactccgacaagctgatcgcccggaagaaggactgggaccccaagaagtacggcggcttcgactcccccaccgtggcctactccgtgctggtggtggccaaggtggagaagggcaagtccaagaagctgaagtccgtgaaggagctgctgggcatcaccatcatggagcggtcctccttcgagaagaaccccatcgacttcctggaggccaagggctacaaggaggtgaagaaggacctgatcatcaagctgcccaagtactccctgttcgagctggagaacggccggaagcggatgctggcctccgccggcgagctgcagaagggcaacgagctggccctgccctccaagtacgtgaacttcctgtacctggcctcccactacgagaagctgaagggctcccccgaggacaacgagcagaagcagctgttcgtggagcagcacaagcactacctggacgagatcatcgagcagatctccgagttctccaagcgggtgatcctggccgacgccaacctggacaaggtgctgtccgcctacaacaagcaccgggacaagcccatccgggagcaggccgagaacatcatccacctgttcaccctgaccaacctgggcgcccccgccgccttcaagtacttcgacaccaccatcgaccggaagcggtacacctccaccaaggaggtgctggacgccaccctgatccaccagtccatcaccggcctgtacgagacccggatcgacctgtcccagctgggcggcgacggcggcggctcccccaagaagaagcggaaggtgtga

SEQ ID NO: 1131 - DNA, 4140 bp, Artificial Sequence
  Synthetic
atggacaagaagtacagcatcggcctggacatcggcaccaacagcgtgggctgggccgtgatcaccgacgagtacaaggtgcccagcaagaagttcaaggtgctgggcaacaccgaccggcacagcatcaagaagaacctgatcggcgccctgctgttcgacagcggcgagaccgccgaggccacccggctgaagcggaccgcccggcggcggtacacccggcggaagaaccggatctgctacctgcaggagatcttcagcaacgagatggccaaggtggacgacagcttcttccaccggctggaggagagcttcctggtggaggaggacaagaagcacgagcggcaccccatcttcggcaacatcgtggacgaggtggcctaccacgagaagtaccccaccatctaccacctgcggaagaagctggtggacagcaccgacaaggccgacctgcggctgatctacctggccctggcccacatgatcaagttccggggccacttcctgatcgagggcgacctgaaccccgacaacagcgacgtggacaagctgttcatccagctggtgcagacctacaaccagctgttcgaggagaaccccatcaacgccagcggcgtggacgccaaggccatcctgagcgcccggctgagcaagagccggcggctggagaacctgatcgcccagctgcccggcgagaagaagaacggcctgttcggcaacctgatcgccctgagcctgggcctgacccccaacttcaagagcaacttcgacctggccgaggacgccaagctgcagctgagcaaggacacctacgacgacgacctggacaacctgctggcccagatcggcgaccagtacgccgacctgttcctggccgccaagaacctgagcgacgccatcctgctgagcgacatcctgcgggtgaacaccgagatcaccaaggcccccctgagcgccagcatgatcaagcggtacgacgagcaccaccaggacctgaccctgctgaaggccctggtgcggcagcagctgcccgagaagtacaaggagatcttcttcgaccagagcaagaacggctacgccggctacatcgacggcggcgccagccaggaggagttctacaagttcatcaagcccatcctggagaagatggacggcaccgaggagctgctggtgaagctgaaccgggaggacctgctgcggaagcagcggaccttcgacaacggcagcatcccccaccagatccacctgggcgagctgcacgccatcctgcggcggcaggaggacttctaccccttcctgaaggacaaccgggagaagatcgagaagatcctgaccttccggatcccctactacgtgggccccctggcccggggcaacagccggttcgcctggatgacccggaagagcgaggagaccatcaccccctggaacttcgaggaggtggtggacaagggcgccagcgcccagagcttcatcgagcggatgaccaacttcgacaagaacctgcccaacgagaaggtgctgcccaagcacagcctgctgtacgagtacttcaccgtgtacaacgagctgaccaaggtgaagtacgtgaccgagggcatgcggaagcccgccttcctgagcggcgagcagaagaaggccatcgtggacctgctgttcaagaccaaccggaaggtgaccgtgaagcagctgaaggaggactacttcaagaagatcgagtgcttcgacagcgtggagatcagcggcgtggaggaccggttcaacgccagcctgggcacctaccacgacctgctgaagatcatcaaggacaaggacttcctggacaacgaggagaacgaggacatcctggaggacatcgtgctgaccctgaccctgttcgaggaccgggagatgatcgaggagcggctgaagacctacgcccacctgttcgacgacaaggtgatgaagcagctgaagcggcggcggtacaccggctggggccggctgagccggaagctgatcaacggcatccgggacaagcagagcggcaagaccatcctggacttcctgaagagcgacggcttcgccaaccggaacttcatgcagctgatccacgacgacagcctgaccttcaaggaggacatccagaaggcccaggtgagcggccagggcgacagcctgcacgagcacatcgccaacctggccggcagccccgccatcaagaagggcatcctgcagaccgtgaaggtggtggacgagctggtgaaggtgatgggccggcacaagcccgagaacatcgtgatcgagatggcccgggagaaccagaccacccagaagggccagaagaacagccgggagcggatgaagcggatcgaggagggcatcaaggagctgggcagccagatcctgaaggagcaccccgtggagaacacccagctgcagaacgagaagctgtacctgtactacctgcagaacggccgggacatgtacgtggaccaggagctggacatcaaccggctgagcgactacgacgtggaccacatcgtgccccagagcttcctgaaggacgacagcatcgacaacaaggtgctgacccggagcgacaagaaccggggcaagagcgacaacgtgcccagcgaggaggtggtgaagaagatgaagaactactggcggcagctgctgaacgccaagctgatcacccagcggaagttcgacaacctgaccaaggccgagcggggcggcctgagcgagctggacaaggccggcttcatcaagcggcagctggtggagacccggcagatcaccaagcacgtggcccagatcctggacagccggatgaacaccaagtacgacgagaacgacaagctgatccgggaggtgaaggtgatcaccctgaagagcaagctggtgagcgacttccggaaggacttccagttctacaaggtgcgggagatcaacaactaccaccacgcccacgacgcctacctgaacgccgtggtgggcaccgccctgatcaagaagtaccccaagctggagagcgagttcgtgtacggcgactacaaggtgtacgacgtgcggaagatgatcgccaagagcgagcaggagatcggcaaggccaccgccaagtacttcttctacagcaacatcatgaacttcttcaagaccgagatcaccctggccaacggcgagatccggaagcggcccctgatcgagaccaacggcgagaccggcgagatcgtgtgggacaagggccgggacttcgccaccgtgcggaaggtgctgagcatgccccaggtgaacatcgtgaagaagaccgaggtgcagaccggcggcttcagcaaggagagcatcctgcccaagcggaacagcgacaagctgatcgcccggaagaaggactgggaccccaagaagtacggcggcttcgacagccccaccgtggcctacagcgtgctggtggtggccaaggtggagaagggcaagagcaagaagctgaagagcgtgaaggagctgctgggcatcaccatcatggagcggagcagcttcgagaagaaccccatcgacttcctggaggccaagggctacaaggaggtgaagaaggacctgatcatcaagctgcccaagtacagcctgttcgagctggagaacggccggaagcggatgctggccagcgccggcgagctgcagaagggcaacgagctggccctgcccagcaagtacgtgaacttcctgtacctggccagccactacgagaagctgaagggcagccccgaggacaacgagcagaagcagctgttcgtggagcagcacaagcactacctggacgagatcatcgagcagatcagcgagttcagcaagcgggtgatcctggccgacgccaacctggacaaggtgctgagcgcctacaacaagcaccgggacaagcccatccgggagcaggccgagaacatcatccacctgttcaccctgaccaacctgggcgcccccgccgccttcaagtacttcgacaccaccatcgaccggaagcggtacaccagcaccaaggaggtgctggacgccaccctgatccaccagagcatcaccggcctgtacgagacccggatcgacctgagccagctgggcggcgacggcggcggcagccccaagaagaagcggaaggtgtga

SEQ ID NO: 1132 - DNA, 4179 bp, Artificial Sequence
  Synthetic
atggacaagaagtactccatcggcctggacatcggcaccaactccgtgggctgggccgtgatcaccgacgagtacaaggtgccctccaagaagttcaaggtgctgggcaacaccgaccggcactccatcaagaagaacctgatcggcgccctgctgttcgactccggcgagaccgccgaggccacccggctgaagcggaccgcccggcggcggtacacccggcggaagaaccggatctgctacctgcaggagatcttctccaacgagatggccaaggtggacgactccttcttccaccggctggaggagtccttcctggtggaggaggacaagaagcacgagcggcaccccatcttcggcaacatcgtggacgaggtggcctaccacgagaagtaccccaccatctaccacctgcggaagaagctggtggactccaccgacaaggccgacctgcggctgatctacctggccctggcccacatgatcaagttccggggccacttcctgatcgagggcgacctgaaccccgacaactccgacgtggacaagctgttcatccagctggtgcagacctacaaccagctgttcgaggagaaccccatcaacgcctccggcgtggacgccaaggccatcctgtccgcccggctgtccaagtcccggcggctggagaacctgatcgcccagctgcccggcgagaagaagaacggcctgttcggcaacctgatcgccctgtccctgggcctgacccccaacttcaagtccaacttcgacctggccgaggacgccaagctgcagctgtccaaggacacctacgacgacgacctggacaacctgctggcccagatcggcgaccagtacgccgacctgttcctggccgccaagaacctgtccgacgccatcctgctgtccgacatcctgcgggtgaacaccgagatcaccaaggcccccctgtccgcctccatgatcaagcggtacgacgagcaccaccaggacctgaccctgctgaaggccctggtgcggcagcagctgcccgagaagtacaaggagatcttcttcgaccagtccaagaacggctacgccggctacatcgacggcggcgcctcccaggaggagttctacaagttcatcaagcccatcctggagaagatggacggcaccgaggagctgctggtgaagctgaaccgggaggacctgctgcggaagcagcggaccttcgacaacggctccatcccccaccagatccacctgggcgagctgcacgccatcctgcggcggcaggaggacttctaccccttcctgaaggacaaccgggagaagatcgagaagatcctgaccttccggatcccctactacgtgggccccctggcccggggcaactcccggttcgcctggatgacccggaagtccgaggagaccatcaccccctggaacttcgaggaggtggtggacaagggcgcctccgcccagtccttcatcgagcggatgaccaacttcgacaagaacctgcccaacgagaaggtgctgcccaagcactccctgctgtacgagtacttcaccgtgtacaacgagctgaccaaggtgaagtacgtgaccgagggcatgcggaagcccgccttcctgtccggcgagcagaagaaggccatcgtggacctgctgttcaagaccaaccggaaggtgaccgtgaagcagctgaaggaggactacttcaagaagatcgagtgcttcgactccgtggagatctccggcgtggaggaccggttcaacgcctccctgggcacctaccacgacctgctgaagatcatcaaggacaaggacttcctggacaacgaggagaacgaggacatcctggaggacatcgtgctgaccctgaccctgttcgaggaccgggagatgatcgaggagcggctgaagacctacgcccacctgttcgacgacaaggtgatgaagcagctgaagcggcggcggtacaccggctggggccggctgtcccggaagctgatcaacggcatccgggacaagcagtccggcaagaccatcctggacttcctgaagtccgacggcttcgccaaccggaacttcatgcagctgatccacgacgactccctgaccttcaaggaggacatccagaaggcccaggtgtccggccagggcgactccctgcacgagcacatcgccaacctggccggctcccccgccatcaagaagggcatcctgcagaccgtgaaggtggtggacgagctggtgaaggtgatgggccggcacaagcccgagaacatcgtgatcgagatggcccgggagaaccagaccacccagaagggccagaagaactcccgggagcggatgaagcggatcgaggagggcatcaaggagctgggctcccagatcctgaaggagcaccccgtggagaacacccagctgcagaacgagaagctgtacctgtactacctgcagaacggccgggacatgtacgtggaccaggagctggacatcaaccggctgtccgactacgacgtggaccacatcgtgccccagtccttcctgaaggacgactccatcgacaacaaggtgctgacccggtccgacaagaaccggggcaagtccgacaacgtgccctccgaggaggtggtgaagaagatgaagaactactggcggcagctgctgaacgccaagctgatcacccagcggaagttcgacaacctgaccaaggccgagcggggcggcctgtccgagctggacaaggccggcttcatcaagcggcagctggtggagacccggcagatcaccaagcacgtggcccagatcctggactcccggatgaacaccaagtacgacgagaacgacaagctgatccgggaggtgaaggtgatcaccctgaagtccaagctggtgtccgacttccggaaggacttccagttctacaaggtgcgggagatcaacaactaccaccacgcccacgacgcctacctgaacgccgtggtgggcaccgccctgatcaagaagtaccccaagctggagtccgagttcgtgtacggcgactacaaggtgtacgacgtgcggaagatgatcgccaagtccgagcaggagatcggcaaggccaccgccaagtacttcttctactccaacatcatgaacttcttcaagaccgagatcaccctggccaacggcgagatccggaagcggcccctgatcgagaccaacggcgagaccggcgagatcgtgtgggacaagggccgggacttcgccaccgtgcggaaggtgctgtccatgccccaggtgaacatcgtgaagaagaccgaggtgcagaccggcggcttctccaaggagtccatcctgcccaagcggaactccgacaagctgatcgcccggaagaaggactgggaccccaagaagtacggcggcttcgactcccccaccgtggcctactccgtgctggtggtggccaaggtggagaagggcaagtccaagaagctgaagtccgtgaaggagctgctgggcatcaccatcatggagcggtcctccttcgagaagaaccccatcgacttcctggaggccaagggctacaaggaggtgaagaaggacctgatcatcaagctgcccaagtactccctgttcgagctggagaacggccggaagcggatgctggcctccgccggcgagctgcagaagggcaacgagctggccctgccctccaagtacgtgaacttcctgtacctggcctcccactacgagaagctgaagggctcccccgaggacaacgagcagaagcagctgttcgtggagcagcacaagcactacctggacgagatcatcgagcagatctccgagttctccaagcgggtgatcctggccgacgccaacctggacaaggtgctgtccgcctacaacaagcaccgggacaagcccatccgggagcaggccgagaacatcatccacctgttcaccctgaccaacctgggcgcccccgccgccttcaagtacttcgacaccaccatcgaccggaagcggtacacctccaccaaggaggtgctggacgccaccctgatccaccagtccatcaccggcctgtacgagacccggatcgacctgtcccagctgggcggcgacggctccggctcccccaagaagaagcggaaggtggacggctcccccaagaagaagcggaaggtggactccggctga

SEQ ID NO: 1133 - DNA, 4140 bp, Artificial Sequence
  Synthetic
atggacaagaagtactccatcggcctggccatcggcaccaactccgtgggctgggccgtgatcaccgacgagtacaaggtgccctccaagaagttcaaggtgctgggcaacaccgaccggcactccatcaagaagaacctgatcggcgccctgctgttcgactccggcgagaccgccgaggccacccggctgaagcggaccgcccggcggcggtacacccggcggaagaaccggatctgctacctgcaggagatcttctccaacgagatggccaaggtggacgactccttcttccaccggctggaggagtccttcctggtggaggaggacaagaagcacgagcggcaccccatcttcggcaacatcgtggacgaggtggcctaccacgagaagtaccccaccatctaccacctgcggaagaagctggtggactccaccgacaaggccgacctgcggctgatctacctggccctggcccacatgatcaagttccggggccacttcctgatcgagggcgacctgaaccccgacaactccgacgtggacaagctgttcatccagctggtgcagacctacaaccagctgttcgaggagaaccccatcaacgcctccggcgtggacgccaaggccatcctgtccgcccggctgtccaagtcccggcggctggagaacctgatcgcccagctgcccggcgagaagaagaacggcctgttcggcaacctgatcgccctgtccctgggcctgacccccaacttcaagtccaacttcgacctggccgaggacgccaagctgcagctgtccaaggacacctacgacgacgacctggacaacctgctggcccagatcggcgaccagtacgccgacctgttcctggccgccaagaacctgtccgacgccatcctgctgtccgacatcctgcgggtgaacaccgagatcaccaaggcccccctgtccgcctccatgatcaagcggtacgacgagcaccaccaggacctgaccctgctgaaggccctggtgcggcagcagctgcccgagaagtacaaggagatcttcttcgaccagtccaagaacggctacgccggctacatcgacggcggcgcctcccaggaggagttctacaagttcatcaagcccatcctggagaagatggacggcaccgaggagctgctggtgaagctgaaccgggaggacctgctgcggaagcagcggaccttcgacaacggctccatcccccaccagatccacctgggcgagctgcacgccatcctgcggcggcaggaggacttctaccccttcctgaaggacaaccgggagaagatcgagaagatcctgaccttccggatcccctactacgtgggccccctggcccggggcaactcccggttcgcctggatgacccggaagtccgaggagaccatcaccccctggaacttcgaggaggtggtggacaagggcgcctccgcccagtccttcatcgagcggatgaccaacttcgacaagaacctgcccaacgagaaggtgctgcccaagcactccctgctgtacgagtacttcaccgtgtacaacgagctgaccaaggtgaagtacgtgaccgagggcatgcggaagcccgccttcctgtccggcgagcagaagaaggccatcgtggacctgctgttcaagaccaaccggaaggtgaccgtgaagcagctgaaggaggactacttcaagaagatcgagtgcttcgactccgtggagatctccggcgtggaggaccggttcaacgcctccctgggcacctaccacgacctgctgaagatcatcaaggacaaggacttcctggacaacgaggagaacgaggacatcctggaggacatcgtgctgaccctgaccctgttcgaggaccgggagatgatcgaggagcggctgaagacctacgcccacctgttcgacgacaaggtgatgaagcagctgaagcggcggcggtacaccggctggggccggctgtcccggaagctgatcaacggcatccgggacaagcagtccggcaagaccatcctggacttcctgaagtccgacggcttcgccaaccggaacttcatgcagctgatccacgacgactccctgaccttcaaggaggacatccagaaggcccaggtgtccggccagggcgactccctgcacgagcacatcgccaacctggccggctcccccgccatcaagaagggcatcctgcagaccgtgaaggtggtggacgagctggtgaaggtgatgggccggcacaagcccgagaacatcgtgatcgagatggcccgggagaaccagaccacccagaagggccagaagaactcccgggagcggatgaagcggatcgaggagggcatcaaggagctgggctcccagatcctgaaggagcaccccgtggagaacacccagctgcagaacgagaagctgtacctgtactacctgcagaacggccgggacatgtacgtggaccaggagctggacatcaaccggctgtccgactacgacgtggaccacatcgtgccccagtccttcctgaaggacgactccatcgacaacaaggtgctgacccggtccgacaagaaccggggcaagtccgacaacgtgccctccgaggaggtggtgaagaagatgaagaactactggcggcagctgctgaacgccaagctgatcacccagcggaagttcgacaacctgaccaaggccgagcggggcggcctgtccgagctggacaaggccggcttcatcaagcggcagctggtggagacccggcagatcaccaagcacgtggcccagatcctggactcccggatgaacaccaagtacgacgagaacgacaagctgatccgggaggtgaaggtgatcaccctgaagtccaagctggtgtccgacttccggaaggacttccagttctacaaggtgcgggagatcaacaactaccaccacgcccacgacgcctacctgaacgccgtggtgggcaccgccctgatcaagaagtaccccaagctggagtccgagttcgtgtacggcgactacaaggtgtacgacgtgcggaagatgatcgccaagtccgagcaggagatcggcaaggccaccgccaagtacttcttctactccaacatcatgaacttcttcaagaccgagatcaccctggccaacggcgagatccggaagcggcccctgatcgagaccaacggcgagaccggcgagatcgtgtgggacaagggccgggacttcgccaccgtgcggaaggtgctgtccatgccccaggtgaacatcgtgaagaagaccgaggtgcagaccggcggcttctccaaggagtccatcctgcccaagcggaactccgacaagctgatcgcccggaagaaggactgggaccccaagaagtacggcggcttcgactcccccaccgtggcctactccgtgctggtggtggccaaggtggagaagggcaagtccaagaagctgaagtccgtgaaggagctgctgggcatcaccatcatggagcggtcctccttcgagaagaaccccatcgacttcctggaggccaagggctacaaggaggtgaagaaggacctgatcatcaagctgcccaagtactccctgttcgagctggagaacggccggaagcggatgctggcctccgccggcgagctgcagaagggcaacgagctggccctgccctccaagtacgtgaacttcctgtacctggcctcccactacgagaagctgaagggctcccccgaggacaacgagcagaagcagctgttcgtggagcagcacaagcactacctggacgagatcatcgagcagatctccgagttctccaagcgggtgatcctggccgacgccaacctggacaaggtgctgtccgcctacaacaagcaccgggacaagcccatccgggagcaggccgagaacatcatccacctgttcaccctgaccaacctgggcgcccccgccgccttcaagtacttcgacaccaccatcgaccggaagcggtacacctccaccaaggaggtgctggacgccaccctgatccaccagtccatcaccggcctgtacgagacccggatcgacctgtcccagctgggcggcgacggcggcggctcccccaagaagaagcggaaggtgtga

SEQ ID NO: 1134 - DNA, 4107 bp, Artificial Sequence
  Synthetic
atggacaagaagtactccatcggcctggccatcggcaccaactccgtgggctgggccgtgatcaccgacgagtacaaggtgccctccaagaagttcaaggtgctgggcaacaccgaccggcactccatcaagaagaacctgatcggcgccctgctgttcgactccggcgagaccgccgaggccacccggctgaagcggaccgcccggcggcggtacacccggcggaagaaccggatctgctacctgcaggagatcttctccaacgagatggccaaggtggacgactccttcttccaccggctggaggagtccttcctggtggaggaggacaagaagcacgagcggcaccccatcttcggcaacatcgtggacgaggtggcctaccacgagaagtaccccaccatctaccacctgcggaagaagctggtggactccaccgacaaggccgacctgcggctgatctacctggccctggcccacatgatcaagttccggggccacttcctgatcgagggcgacctgaaccccgacaactccgacgtggacaagctgttcatccagctggtgcagacctacaaccagctgttcgaggagaaccccatcaacgcctccggcgtggacgccaaggccatcctgtccgcccggctgtccaagtcccggcggctggagaacctgatcgcccagctgcccggcgagaagaagaacggcctgttcggcaacctgatcgccctgtccctgggcctgacccccaacttcaagtccaacttcgacctggccgaggacgccaagctgcagctgtccaaggacacctacgacgacgacctggacaacctgctggcccagatcggcgaccagtacgccgacctgttcctggccgccaagaacctgtccgacgccatcctgctgtccgacatcctgcgggtgaacaccgagatcaccaaggcccccctgtccgcctccatgatcaagcggtacgacgagcaccaccaggacctgaccctgctgaaggccctggtgcggcagcagctgcccgagaagtacaaggagatcttcttcgaccagtccaagaacggctacgccggctacatcgacggcggcgcctcccaggaggagttctacaagttcatcaagcccatcctggagaagatggacggcaccgaggagctgctggtgaagctgaaccgggaggacctgctgcggaagcagcggaccttcgacaacggctccatcccccaccagatccacctgggcgagctgcacgccatcctgcggcggcaggaggacttctaccccttcctgaaggacaaccgggagaagatcgagaagatcctgaccttccggatcccctactacgtgggccccctggcccggggcaactcccggttcgcctggatgacccggaagtccgaggagaccatcaccccctggaacttcgaggaggtggtggacaagggcgcctccgcccagtccttcatcgagcggatgaccaacttcgacaagaacctgcccaacgagaaggtgctgcccaagcactccctgctgtacgagtacttcaccgtgtacaacgagctgaccaaggtgaagtacgtgaccgagggcatgcggaagcccgccttcctgtccggcgagcagaagaaggccatcgtggacctgctgttcaagaccaaccggaaggtgaccgtgaagcagctgaaggaggactacttcaagaagatcgagtgcttcgactccgtggagatctccggcgtggaggaccggttcaacgcctccctgggcacctaccacgacctgctgaagatcatcaaggacaaggacttcctggacaacgaggagaacgaggacatcctggaggacatcgtgctgaccctgaccctgttcgaggaccgggagatgatcgaggagcggctgaagacctacgcccacctgttcgacgacaaggtgatgaagcagctgaagcggcggcggtacaccggctggggccggctgtcccggaagctgatcaacggcatccgggacaagcagtccggcaagaccatcctggacttcctgaagtccgacggcttcgccaaccggaacttcatgcagctgatccacgacgactccctgaccttcaaggaggacatccagaaggcccaggtgtccggccagggcgactccctgcacgagcacatcgccaacctggccggctcccccgccatcaagaagggcatcctgcagaccgtgaaggtggtggacgagctggtgaaggtgatgggccggcacaagcccgagaacatcgtgatcgagatggcccgggagaaccagaccacccagaagggccagaagaactcccgggagcggatgaagcggatcgaggagggcatcaaggagctgggctcccagatcctgaaggagcaccccgtggagaacacccagctgcagaacgagaagctgtacctgtactacctgcagaacggccgggacatgtacgtggaccaggagctggacatcaaccggctgtccgactacgacgtggaccacatcgtgccccagtccttcctgaaggacgactccatcgacaacaaggtgctgacccggtccgacaagaaccggggcaagtccgacaacgtgccctccgaggaggtggtgaagaagatgaagaactactggcggcagctgctgaacgccaagctgatcacccagcggaagttcgacaacctgaccaaggccgagcggggcggcctgtccgagctggacaaggccggcttcatcaagcggcagctggtggagacccggcagatcaccaagcacgtggcccagatcctggactcccggatgaacaccaagtacgacgagaacgacaagctgatccgggaggtgaaggtgatcaccctgaagtccaagctggtgtccgacttccggaaggacttccagttctacaaggtgcgggagatcaacaactaccaccacgcccacgacgcctacctgaacgccgtggtgggcaccgccctgatcaagaagtaccccaagctggagtccgagttcgtgtacggcgactacaaggtgtacgacgtgcggaagatgatcgccaagtccgagcaggagatcggcaaggccaccgccaagtacttcttctactccaacatcatgaacttcttcaagaccgagatcaccctggccaacggcgagatccggaagcggcccctgatcgagaccaacggcgagaccggcgagatcgtgtgggacaagggccgggacttcgccaccgtgcggaaggtgctgtccatgccccaggtgaacatcgtgaagaagaccgaggtgcagaccggcggcttctccaaggagtccatcctgcccaagcggaactccgacaagctgatcgcccggaagaaggactgggaccccaagaagtacggcggcttcgactcccccaccgtggcctactccgtgctggtggtggccaaggtggagaagggcaagtccaagaagctgaagtccgtgaaggagctgctgggcatcaccatcatggagcggtcctccttcgagaagaaccccatcgacttcctggaggccaagggctacaaggaggtgaagaaggacctgatcatcaagctgcccaagtactccctgttcgagctggagaacggccggaagcggatgctggcctccgccggcgagctgcagaagggcaacgagctggccctgccctccaagtacgtgaacttcctgtacctggcctcccactacgagaagctgaagggctcccccgaggacaacgagcagaagcagctgttcgtggagcagcacaagcactacctggacgagatcatcgagcagatctccgagttctccaagcgggtgatcctggccgacgccaacctggacaaggtgctgtccgcctacaacaagcaccgggacaagcccatccgggagcaggccgagaacatcatccacctgttcaccctgaccaacctgggcgcccccgccgccttcaagtacttcgacaccaccatcgaccggaagcggtacacctccaccaaggaggtgctggacgccaccctgatccaccagtccatcaccggcctgtacgagacccggatcgacctgtcccagctgggcggcgactga

SEQ ID NO: 1135 - DNA, 4179 bp, Artificial Sequence
  Synthetic
atggacaagaagtactccatcggcctggccatcggcaccaactccgtgggctgggccgtgatcaccgacgagtacaaggtgccctccaagaagttcaaggtgctgggcaacaccgaccggcactccatcaagaagaacctgatcggcgccctgctgttcgactccggcgagaccgccgaggccacccggctgaagcggaccgcccggcggcggtacacccggcggaagaaccggatctgctacctgcaggagatcttctccaacgagatggccaaggtggacgactccttcttccaccggctggaggagtccttcctggtggaggaggacaagaagcacgagcggcaccccatcttcggcaacatcgtggacgaggtggcctaccacgagaagtaccccaccatctaccacctgcggaagaagctggtggactccaccgacaaggccgacctgcggctgatctacctggccctggcccacatgatcaagttccggggccacttcctgatcgagggcgacctgaaccccgacaactccgacgtggacaagctgttcatccagctggtgcagacctacaaccagctgttcgaggagaaccccatcaacgcctccggcgtggacgccaaggccatcctgtccgcccggctgtccaagtcccggcggctggagaacctgatcgcccagctgcccggcgagaagaagaacggcctgttcggcaacctgatcgccctgtccctgggcctgacccccaacttcaagtccaacttcgacctggccgaggacgccaagctgcagctgtccaaggacacctacgacgacgacctggacaacctgctggcccagatcggcgaccagtacgccgacctgttcctggccgccaagaacctgtccgacgccatcctgctgtccgacatcctgcgggtgaacaccgagatcaccaaggcccccctgtccgcctccatgatcaagcggtacgacgagcaccaccaggacctgaccctgctgaaggccctggtgcggcagcagctgcccgagaagtacaaggagatcttcttcgaccagtccaagaacggctacgccggctacatcgacggcggcgcctcccaggaggagttctacaagttcatcaagcccatcctggagaagatggacggcaccgaggagctgctggtgaagctgaaccgggaggacctgctgcggaagcagcggaccttcgacaacggctccatcccccaccagatccacctgggcgagctgcacgccatcctgcggcggcaggaggacttctaccccttcctgaaggacaaccgggagaagatcgagaagatcctgaccttccggatcccctactacgtgggccccctggcccggggcaactcccggttcgcctggatgacccggaagtccgaggagaccatcaccccctggaacttcgaggaggtggtggacaagggcgcctccgcccagtccttcatcgagcggatgaccaacttcgacaagaacctgcccaacgagaaggtgctgcccaagcactccctgctgtacgagtacttcaccgtgtacaacgagctgaccaaggtgaagtacgtgaccgagggcatgcggaagcccgccttcctgtccggcgagcagaagaaggccatcgtggacctgctgttcaagaccaaccggaaggtgaccgtgaagcagctgaaggaggactacttcaagaagatcgagtgcttcgactccgtggagatctccggcgtggaggaccggttcaacgcctccctgggcacctaccacgacctgctgaagatcatcaaggacaaggacttcctggacaacgaggagaacgaggacatcctggaggacatcgtgctgaccctgaccctgttcgaggaccgggagatgatcgaggagcggctgaagacctacgcccacctgttcgacgacaaggtgatgaagcagctgaagcggcggcggtacaccggctggggccggctgtcccggaagctgatcaacggcatccgggacaagcagtccggcaagaccatcctggacttcctgaagtccgacggcttcgccaaccggaacttcatgcagctgatccacgacgactccctgaccttcaaggaggacatccagaaggcccaggtgtccggccagggcgactccctgcacgagcacatcgccaacctggccggctcccccgccatcaagaagggcatcctgcagaccgtgaaggtggtggacgagctggtgaaggtgatgggccggcacaagcccgagaacatcgtgatcgagatggcccgggagaaccagaccacccagaagggccagaagaactcccgggagcggatgaagcggatcgaggagggcatcaaggagctgggctcccagatcctgaaggagcaccccgtggagaacacccagctgcagaacgagaagctgtacctgtactacctgcagaacggccgggacatgtacgtggaccaggagctggacatcaaccggctgtccgactacgacgtggaccacatcgtgccccagtccttcctgaaggacgactccatcgacaacaaggtgctgacccggtccgacaagaaccggggcaagtccgacaacgtgccctccgaggaggtggtgaagaagatgaagaactactggcggcagctgctgaacgccaagctgatcacccagcggaagttcgacaacctgaccaaggccgagcggggcggcctgtccgagctggacaaggccggcttcatcaagcggcagctggtggagacccggcagatcaccaagcacgtggcccagatcctggactcccggatgaacaccaagtacgacgagaacgacaagctgatccgggaggtgaaggtgatcaccctgaagtccaagctggtgtccgacttccggaaggacttccagttctacaaggtgcgggagatcaacaactaccaccacgcccacgacgcctacctgaacgccgtggtgggcaccgccctgatcaagaagtaccccaagctggagtccgagttcgtgtacggcgactacaaggtgtacgacgtgcggaagatgatcgccaagtccgagcaggagatcggcaaggccaccgccaagtacttcttctactccaacatcatgaacttcttcaagaccgagatcaccctggccaacggcgagatccggaagcggcccctgatcgagaccaacggcgagaccggcgagatcgtgtgggacaagggccgggacttcgccaccgtgcggaaggtgctgtccatgccccaggtgaacatcgtgaagaagaccgaggtgcagaccggcggcttctccaaggagtccatcctgcccaagcggaactccgacaagctgatcgcccggaagaaggactgggaccccaagaagtacggcggcttcgactcccccaccgtggcctactccgtgctggtggtggccaaggtggagaagggcaagtccaagaagctgaagtccgtgaaggagctgctgggcatcaccatcatggagcggtcctccttcgagaagaaccccatcgacttcctggaggccaagggctacaaggaggtgaagaaggacctgatcatcaagctgcccaagtactccctgttcgagctggagaacggccggaagcggatgctggcctccgccggcgagctgcagaagggcaacgagctggccctgccctccaagtacgtgaacttcctgtacctggcctcccactacgagaagctgaagggctcccccgaggacaacgagcagaagcagctgttcgtggagcagcacaagcactacctggacgagatcatcgagcagatctccgagttctccaagcgggtgatcctggccgacgccaacctggacaaggtgctgtccgcctacaacaagcaccgggacaagcccatccgggagcaggccgagaacatcatccacctgttcaccctgaccaacctgggcgcccccgccgccttcaagtacttcgacaccaccatcgaccggaagcggtacacctccaccaaggaggtgctggacgccaccctgatccaccagtccatcaccggcctgtacgagacccggatcgacctgtcccagctgggcggcgacggctccggctcccccaagaagaagcggaaggtggacggctcccccaagaagaagcggaaggtggactccggctga

SEQ ID NO: 1136 - DNA, 4140 bp, Artificial Sequence
  Synthetic
atggacaagaagtactccatcggcctggccatcggcaccaactccgtgggctgggccgtgatcaccgacgagtacaaggtgccctccaagaagttcaaggtgctgggcaacaccgaccggcactccatcaagaagaacctgatcggcgccctgctgttcgactccggcgagaccgccgaggccacccggctgaagcggaccgcccggcggcggtacacccggcggaagaaccggatctgctacctgcaggagatcttctccaacgagatggccaaggtggacgactccttcttccaccggctggaggagtccttcctggtggaggaggacaagaagcacgagcggcaccccatcttcggcaacatcgtggacgaggtggcctaccacgagaagtaccccaccatctaccacctgcggaagaagctggtggactccaccgacaaggccgacctgcggctgatctacctggccctggcccacatgatcaagttccggggccacttcctgatcgagggcgacctgaaccccgacaactccgacgtggacaagctgttcatccagctggtgcagacctacaaccagctgttcgaggagaaccccatcaacgcctccggcgtggacgccaaggccatcctgtccgcccggctgtccaagtcccggcggctggagaacctgatcgcccagctgcccggcgagaagaagaacggcctgttcggcaacctgatcgccctgtccctgggcctgacccccaacttcaagtccaacttcgacctggccgaggacgccaagctgcagctgtccaaggacacctacgacgacgacctggacaacctgctggcccagatcggcgaccagtacgccgacctgttcctggccgccaagaacctgtccgacgccatcctgctgtccgacatcctgcgggtgaacaccgagatcaccaaggcccccctgtccgcctccatgatcaagcggtacgacgagcaccaccaggacctgaccctgctgaaggccctggtgcggcagcagctgcccgagaagtacaaggagatcttcttcgaccagtccaagaacggctacgccggctacatcgacggcggcgcctcccaggaggagttctacaagttcatcaagcccatcctggagaagatggacggcaccgaggagctgctggtgaagctgaaccgggaggacctgctgcggaagcagcggaccttcgacaacggctccatcccccaccagatccacctgggcgagctgcacgccatcctgcggcggcaggaggacttctaccccttcctgaaggacaaccgggagaagatcgagaagatcctgaccttccggatcccctactacgtgggccccctggcccggggcaactcccggttcgcctggatgacccggaagtccgaggagaccatcaccccctggaacttcgaggaggtggtggacaagggcgcctccgcccagtccttcatcgagcggatgaccaacttcgacaagaacctgcccaacgagaaggtgctgcccaagcactccctgctgtacgagtacttcaccgtgtacaacgagctgaccaaggtgaagtacgtgaccgagggcatgcggaagcccgccttcctgtccggcgagcagaagaaggccatcgtggacctgctgttcaagaccaaccggaaggtgaccgtgaagcagctgaaggaggactacttcaagaagatcgagtgcttcgactccgtggagatctccggcgtggaggaccggttcaacgcctccctgggcacctaccacgacctgctgaagatcatcaaggacaaggacttcctggacaacgaggagaacgaggacatcctggaggacatcgtgctgaccctgaccctgttcgaggaccgggagatgatcgaggagcggctgaagacctacgcccacctgttcgacgacaaggtgatgaagcagctgaagcggcggcggtacaccggctggggccggctgtcccggaagctgatcaacggcatccgggacaagcagtccggcaagaccatcctggacttcctgaagtccgacggcttcgccaaccggaacttcatgcagctgatccacgacgactccctgaccttcaaggaggacatccagaaggcccaggtgtccggccagggcgactccctgcacgagcacatcgccaacctggccggctcccccgccatcaagaagggcatcctgcagaccgtgaaggtggtggacgagctggtgaaggtgatgggccggcacaagcccgagaacatcgtgatcgagatggcccgggagaaccagaccacccagaagggccagaagaactcccgggagcggatgaagcggatcgaggagggcatcaaggagctgggctcccagatcctgaaggagcaccccgtggagaacacccagctgcagaacgagaagctgtacctgtactacctgcagaacggccgggacatgtacgtggaccaggagctggacatcaaccggctgtccgactacgacgtggacgccatcgtgccccagtccttcctgaaggacgactccatcgacaacaaggtgctgacccggtccgacaagaaccggggcaagtccgacaacgtgccctccgaggaggtggtgaagaagatgaagaactactggcggcagctgctgaacgccaagctgatcacccagcggaagttcgacaacctgaccaaggccgagcggggcggcctgtccgagctggacaaggccggcttcatcaagcggcagctggtggagacccggcagatcaccaagcacgtggcccagatcctggactcccggatgaacaccaagtacgacgagaacgacaagctgatccgggaggtgaaggtgatcaccctgaagtccaagctggtgtccgacttccggaaggacttccagttctacaaggtgcgggagatcaacaactaccaccacgcccacgacgcctacctgaacgccgtggtgggcaccgccctgatcaagaagtaccccaagctggagtccgagttcgtgtacggcgactacaaggtgtacgacgtgcggaagatgatcgccaagtccgagcaggagatcggcaaggccaccgccaagtacttcttctactccaacatcatgaacttcttcaagaccgagatcaccctggccaacggcgagatccggaagcggcccctgatcgagaccaacggcgagaccggcgagatcgtgtgggacaagggccgggacttcgccaccgtgcggaaggtgctgtccatgccccaggtgaacatcgtgaagaagaccgaggtgcagaccggcggcttctccaaggagtccatcctgcccaagcggaactccgacaagctgatcgcccggaagaaggactgggaccccaagaagtacggcggcttcgactcccccaccgtggcctactccgtgctggtggtggccaaggtggagaagggcaagtccaagaagctgaagtccgtgaaggagctgctgggcatcaccatcatggagcggtcctccttcgagaagaaccccatcgacttcctggaggccaagggctacaaggaggtgaagaaggacctgatcatcaagctgcccaagtactccctgttcgagctggagaacggccggaagcggatgctggcctccgccggcgagctgcagaagggcaacgagctggccctgccctccaagtacgtgaacttcctgtacctggcctcccactacgagaagctgaagggctcccccgaggacaacgagcagaagcagctgttcgtggagcagcacaagcactacctggacgagatcatcgagcagatctccgagttctccaagcgggtgatcctggccgacgccaacctggacaaggtgctgtccgcctacaacaagcaccgggacaagcccatccgggagcaggccgagaacatcatccacctgttcaccctgaccaacctgggcgcccccgccgccttcaagtacttcgacaccaccatcgaccggaagcggtacacctccaccaaggaggtgctggacgccaccctgatccaccagtccatcaccggcctgtacgagacccggatcgacctgtcccagctgggcggcgacggcggcggctcccccaagaagaagcggaaggtgtga

SEQ ID NO: 1137 - DNA, 4107 bp, Artificial Sequence
  Synthetic
atggacaagaagtactccatcggcctggccatcggcaccaactccgtgggctgggccgtgatcaccgacgagtacaaggtgccctccaagaagttcaaggtgctgggcaacaccgaccggcactccatcaagaagaacctgatcggcgccctgctgttcgactccggcgagaccgccgaggccacccggctgaagcggaccgcccggcggcggtacacccggcggaagaaccggatctgctacctgcaggagatcttctccaacgagatggccaaggtggacgactccttcttccaccggctggaggagtccttcctggtggaggaggacaagaagcacgagcggcaccccatcttcggcaacatcgtggacgaggtggcctaccacgagaagtaccccaccatctaccacctgcggaagaagctggtggactccaccgacaaggccgacctgcggctgatctacctggccctggcccacatgatcaagttccggggccacttcctgatcgagggcgacctgaaccccgacaactccgacgtggacaagctgttcatccagctggtgcagacctacaaccagctgttcgaggagaaccccatcaacgcctccggcgtggacgccaaggccatcctgtccgcccggctgtccaagtcccggcggctggagaacctgatcgcccagctgcccggcgagaagaagaacggcctgttcggcaacctgatcgccctgtccctgggcctgacccccaacttcaagtccaacttcgacctggccgaggacgccaagctgcagctgtccaaggacacctacgacgacgacctggacaacctgctggcccagatcggcgaccagtacgccgacctgttcctggccgccaagaacctgtccgacgccatcctgctgtccgacatcctgcgggtgaacaccgagatcaccaaggcccccctgtccgcctccatgatcaagcggtacgacgagcaccaccaggacctgaccctgctgaaggccctggtgcggcagcagctgcccgagaagtacaaggagatcttcttcgaccagtccaagaacggctacgccggctacatcgacggcggcgcctcccaggaggagttctacaagttcatcaagcccatcctggagaagatggacggcaccgaggagctgctggtgaagctgaaccgggaggacctgctgcggaagcagcggaccttcgacaacggctccatcccccaccagatccacctgggcgagctgcacgccatcctgcggcggcaggaggacttctaccccttcctgaaggacaaccgggagaagatcgagaagatcctgaccttccggatcccctactacgtgggccccctggcccggggcaactcccggttcgcctggatgacccggaagtccgaggagaccatcaccccctggaacttcgaggaggtggtggacaagggcgcctccgcccagtccttcatcgagcggatgaccaacttcgacaagaacctgcccaacgagaaggtgctgcccaagcactccctgctgtacgagtacttcaccgtgtacaacgagctgaccaaggtgaagtacgtgaccgagggcatgcggaagcccgccttcctgtccggcgagcagaagaaggccatcgtggacctgctgttcaagaccaaccggaaggtgaccgtgaagcagctgaaggaggactacttcaagaagatcgagtgcttcgactccgtggagatctccggcgtggaggaccggttcaacgcctccctgggcacctaccacgacctgctgaagatcatcaaggacaaggacttcctggacaacgaggagaacgaggacatcctggaggacatcgtgctgaccctgaccctgttcgaggaccgggagatgatcgaggagcggctgaagacctacgcccacctgttcgacgacaaggtgatgaagcagctgaagcggcggcggtacaccggctggggccggctgtcccggaagctgatcaacggcatccgggacaagcagtccggcaagaccatcctggacttcctgaagtccgacggcttcgccaaccggaacttcatgcagctgatccacgacgactccctgaccttcaaggaggacatccagaaggcccaggtgtccggccagggcgactccctgcacgagcacatcgccaacctggccggctcccccgccatcaagaagggcatcctgcagaccgtgaaggtggtggacgagctggtgaaggtgatgggccggcacaagcccgagaacatcgtgatcgagatggcccgggagaaccagaccacccagaagggccagaagaactcccgggagcggatgaagcggatcgaggagggcatcaaggagctgggctcccagatcctgaaggagcaccccgtggagaacacccagctgcagaacgagaagctgtacctgtactacctgcagaacggccgggacatgtacgtggaccaggagctggacatcaaccggctgtccgactacgacgtggacgccatcgtgccccagtccttcctgaaggacgactccatcgacaacaaggtgctgacccggtccgacaagaaccggggcaagtccgacaacgtgccctccgaggaggtggtgaagaagatgaagaactactggcggcagctgctgaacgccaagctgatcacccagcggaagttcgacaacctgaccaaggccgagcggggcggcctgtccgagctggacaaggccggcttcatcaagcggcagctggtggagacccggcagatcaccaagcacgtggcccagatcctggactcccggatgaacaccaagtacgacgagaacgacaagctgatccgggaggtgaaggtgatcaccctgaagtccaagctggtgtccgacttccggaaggacttccagttctacaaggtgcgggagatcaacaactaccaccacgcccacgacgcctacctgaacgccgtggtgggcaccgccctgatcaagaagtaccccaagctggagtccgagttcgtgtacggcgactacaaggtgtacgacgtgcggaagatgatcgccaagtccgagcaggagatcggcaaggccaccgccaagtacttcttctactccaacatcatgaacttcttcaagaccgagatcaccctggccaacggcgagatccggaagcggcccctgatcgagaccaacggcgagaccggcgagatcgtgtgggacaagggccgggacttcgccaccgtgcggaaggtgctgtccatgccccaggtgaacatcgtgaagaagaccgaggtgcagaccggcggcttctccaaggagtccatcctgcccaagcggaactccgacaagctgatcgcccggaagaaggactgggaccccaagaagtacggcggcttcgactcccccaccgtggcctactccgtgctggtggtggccaaggtggagaagggcaagtccaagaagctgaagtccgtgaaggagctgctgggcatcaccatcatggagcggtcctccttcgagaagaaccccatcgacttcctggaggccaagggctacaaggaggtgaagaaggacctgatcatcaagctgcccaagtactccctgttcgagctggagaacggccggaagcggatgctggcctccgccggcgagctgcagaagggcaacgagctggccctgccctccaagtacgtgaacttcctgtacctggcctcccactacgagaagctgaagggctcccccgaggacaacgagcagaagcagctgttcgtggagcagcacaagcactacctggacgagatcatcgagcagatctccgagttctccaagcgggtgatcctggccgacgccaacctggacaaggtgctgtccgcctacaacaagcaccgggacaagcccatccgggagcaggccgagaacatcatccacctgttcaccctgaccaacctgggcgcccccgccgccttcaagtacttcgacaccaccatcgaccggaagcggtacacctccaccaaggaggtgctggacgccaccctgatccaccagtccatcaccggcctgtacgagacccggatcgacctgtcccagctgggcggcgactga

SEQ ID NO: 1138 - DNA, 4179 bp, Artificial Sequence
  Synthetic
atggacaagaagtactccatcggcctggccatcggcaccaactccgtgggctgggccgtgatcaccgacgagtacaaggtgccctccaagaagttcaaggtgctgggcaacaccgaccggcactccatcaagaagaacctgatcggcgccctgctgttcgactccggcgagaccgccgaggccacccggctgaagcggaccgcccggcggcggtacacccggcggaagaaccggatctgctacctgcaggagatcttctccaacgagatggccaaggtggacgactccttcttccaccggctggaggagtccttcctggtggaggaggacaagaagcacgagcggcaccccatcttcggcaacatcgtggacgaggtggcctaccacgagaagtaccccaccatctaccacctgcggaagaagctggtggactccaccgacaaggccgacctgcggctgatctacctggccctggcccacatgatcaagttccggggccacttcctgatcgagggcgacctgaaccccgacaactccgacgtggacaagctgttcatccagctggtgcagacctacaaccagctgttcgaggagaaccccatcaacgcctccggcgtggacgccaaggccatcctgtccgcccggctgtccaagtcccggcggctggagaacctgatcgcccagctgcccggcgagaagaagaacggcctgttcggcaacctgatcgccctgtccctgggcctgacccccaacttcaagtccaacttcgacctggccgaggacgccaagctgcagctgtccaaggacacctacgacgacgacctggacaacctgctggcccagatcggcgaccagtacgccgacctgttcctggccgccaagaacctgtccgacgccatcctgctgtccgacatcctgcgggtgaacaccgagatcaccaaggcccccctgtccgcctccatgatcaagcggtacgacgagcaccaccaggacctgaccctgctgaaggccctggtgcggcagcagctgcccgagaagtacaaggagatcttcttcgaccagtccaagaacggctacgccggctacatcgacggcggcgcctcccaggaggagttctacaagttcatcaagcccatcctggagaagatggacggcaccgaggagctgctggtgaagctgaaccgggaggacctgctgcggaagcagcggaccttcgacaacggctccatcccccaccagatccacctgggcgagctgcacgccatcctgcggcggcaggaggacttctaccccttcctgaaggacaaccgggagaagatcgagaagatcctgaccttccggatcccctactacgtgggccccctggcccggggcaactcccggttcgcctggatgacccggaagtccgaggagaccatcaccccctggaacttcgaggaggtggtggacaagggcgcctccgcccagtccttcatcgagcggatgaccaacttcgacaagaacctgcccaacgagaaggtgctgcccaagcactccctgctgtacgagtacttcaccgtgtacaacgagctgaccaaggtgaagtacgtgaccgagggcatgcggaagcccgccttcctgtccggcgagcagaagaaggccatcgtggacctgctgttcaagaccaaccggaaggtgaccgtgaagcagctgaaggaggactacttcaagaagatcgagtgcttcgactccgtggagatctccggcgtggaggaccggttcaacgcctccctgggcacctaccacgacctgctgaagatcatcaaggacaaggacttcctggacaacgaggagaacgaggacatcctggaggacatcgtgctgaccctgaccctgttcgaggaccgggagatgatcgaggagcggctgaagacctacgcccacctgttcgacgacaaggtgatgaagcagctgaagcggcggcggtacaccggctggggccggctgtcccggaagctgatcaacggcatccgggacaagcagtccggcaagaccatcctggacttcctgaagtccgacggcttcgccaaccggaacttcatgcagctgatccacgacgactccctgaccttcaaggaggacatccagaaggcccaggtgtccggccagggcgactccctgcacgagcacatcgccaacctggccggctcccccgccatcaagaagggcatcctgcagaccgtgaaggtggtggacgagctggtgaaggtgatgggccggcacaagcccgagaacatcgtgatcgagatggcccgggagaaccagaccacccagaagggccagaagaactcccgggagcggatgaagcggatcgaggagggcatcaaggagctgggctcccagatcctgaaggagcaccccgtggagaacacccagctgcagaacgagaagctgtacctgtactacctgcagaacggccgggacatgtacgtggaccaggagctggacatcaaccggctgtccgactacgacgtggacgccatcgtgccccagtccttcctgaaggacgactccatcgacaacaaggtgctgacccggtccgacaagaaccggggcaagtccgacaacgtgccctccgaggaggtggtgaagaagatgaagaactactggcggcagctgctgaacgccaagctgatcacccagcggaagttcgacaacctgaccaaggccgagcggggcggcctgtccgagctggacaaggccggcttcatcaagcggcagctggtggagacccggcagatcaccaagcacgtggcccagatcctggactcccggatgaacaccaagtacgacgagaacgacaagctgatccgggaggtgaaggtgatcaccctgaagtccaagctggtgtccgacttccggaaggacttccagttctacaaggtgcgggagatcaacaactaccaccacgcccacgacgcctacctgaacgccgtggtgggcaccgccctgatcaagaagtaccccaagctggagtccgagttcgtgtacggcgactacaaggtgtacgacgtgcggaagatgatcgccaagtccgagcaggagatcggcaaggccaccgccaagtacttcttctactccaacatcatgaacttcttcaagaccgagatcaccctggccaacggcgagatccggaagcggcccctgatcgagaccaacggcgagaccggcgagatcgtgtgggacaagggccgggacttcgccaccgtgcggaaggtgctgtccatgccccaggtgaacatcgtgaagaagaccgaggtgcagaccggcggcttctccaaggagtccatcctgcccaagcggaactccgacaagctgatcgcccggaagaaggactgggaccccaagaagtacggcggcttcgactcccccaccgtggcctactccgtgctggtggtggccaaggtggagaagggcaagtccaagaagctgaagtccgtgaaggagctgctgggcatcaccatcatggagcggtcctccttcgagaagaaccccatcgacttcctggaggccaagggctacaaggaggtgaagaaggacctgatcatcaagctgcccaagtactccctgttcgagctggagaacggccggaagcggatgctggcctccgccggcgagctgcagaagggcaacgagctggccctgccctccaagtacgtgaacttcctgtacctggcctcccactacgagaagctgaagggctcccccgaggacaacgagcagaagcagctgttcgtggagcagcacaagcactacctggacgagatcatcgagcagatctccgagttctccaagcgggtgatcctggccgacgccaacctggacaaggtgctgtccgcctacaacaagcaccgggacaagcccatccgggagcaggccgagaacatcatccacctgttcaccctgaccaacctgggcgcccccgccgccttcaagtacttcgacaccaccatcgaccggaagcggtacacctccaccaaggaggtgctggacgccaccctgatccaccagtccatcaccggcctgtacgagacccggatcgacctgtcccagctgggcggcgacggctccggctcccccaagaagaagcggaaggtggacggctcccccaagaagaagcggaaggtggactccggctga

SEQ ID NO: 1139 - DNA, 4179 bp, Artificial Sequence
  Synthetic
atggacaagaagtacagcatcggcctggacatcggcaccaacagcgtgggctgggccgtgatcaccgacgagtacaaggtgcccagcaagaagttcaaggtgctgggcaacaccgaccggcacagcatcaagaagaacctgatcggcgccctgctgttcgacagcggcgagaccgccgaggccacccggctgaagcggaccgcccggcggcggtacacccggcggaagaaccggatctgctacctgcaggagatcttcagcaacgagatggccaaggtggacgacagcttcttccaccggctggaggagagcttcctggtggaggaggacaagaagcacgagcggcaccccatcttcggcaacatcgtggacgaggtggcctaccacgagaagtaccccaccatctaccacctgcggaagaagctggtggacagcaccgacaaggccgacctgcggctgatctacctggccctggcccacatgatcaagttccggggccacttcctgatcgagggcgacctgaaccccgacaacagcgacgtggacaagctgttcatccagctggtgcagacctacaaccagctgttcgaggagaaccccatcaacgccagcggcgtggacgccaaggccatcctgagcgcccggctgagcaagagccggcggctggagaacctgatcgcccagctgcccggcgagaagaagaacggcctgttcggcaacctgatcgccctgagcctgggcctgacccccaacttcaagagcaacttcgacctggccgaggacgccaagctgcagctgagcaaggacacctacgacgacgacctggacaacctgctggcccagatcggcgaccagtacgccgacctgttcctggccgccaagaacctgagcgacgccatcctgctgagcgacatcctgcgggtgaacaccgagatcaccaaggcccccctgagcgccagcatgatcaagcggtacgacgagcaccaccaggacctgaccctgctgaaggccctggtgcggcagcagctgcccgagaagtacaaggagatcttcttcgaccagagcaagaacggctacgccggctacatcgacggcggcgccagccaggaggagttctacaagttcatcaagcccatcctggagaagatggacggcaccgaggagctgctggtgaagctgaaccgggaggacctgctgcggaagcagcggaccttcgacaacggcagcatcccccaccagatccacctgggcgagctgcacgccatcctgcggcggcaggaggacttctaccccttcctgaaggacaaccgggagaagatcgagaagatcctgaccttccggatcccctactacgtgggccccctggcccggggcaacagccggttcgcctggatgacccggaagagcgaggagaccatcaccccctggaacttcgaggaggtggtggacaagggcgccagcgcccagagcttcatcgagcggatgaccaacttcgacaagaacctgcccaacgagaaggtgctgcccaagcacagcctgctgtacgagtacttcaccgtgtacaacgagctgaccaaggtgaagtacgtgaccgagggcatgcggaagcccgccttcctgagcggcgagcagaagaaggccatcgtggacctgctgttcaagaccaaccggaaggtgaccgtgaagcagctgaaggaggactacttcaagaagatcgagtgcttcgacagcgtggagatcagcggcgtggaggaccggttcaacgccagcctgggcacctaccacgacctgctgaagatcatcaaggacaaggacttcctggacaacgaggagaacgaggacatcctggaggacatcgtgctgaccctgaccctgttcgaggaccgggagatgatcgaggagcggctgaagacctacgcccacctgttcgacgacaaggtgatgaagcagctgaagcggcggcggtacaccggctggggccggctgagccggaagctgatcaacggcatccgggacaagcagagcggcaagaccatcctggacttcctgaagagcgacggcttcgccaaccggaacttcatgcagctgatccacgacgacagcctgaccttcaaggaggacatccagaaggcccaggtgagcggccagggcgacagcctgcacgagcacatcgccaacctggccggcagccccgccatcaagaagggcatcctgcagaccgtgaaggtggtggacgagctggtgaaggtgatgggccggcacaagcccgagaacatcgtgatcgagatggcccgggagaaccagaccacccagaagggccagaagaacagccgggagcggatgaagcggatcgaggagggcatcaaggagctgggcagccagatcctgaaggagcaccccgtggagaacacccagctgcagaacgagaagctgtacctgtactacctgcagaacggccgggacatgtacgtggaccaggagctggacatcaaccggctgagcgactacgacgtggaccacatcgtgccccagagcttcctgaaggacgacagcatcgacaacaaggtgctgacccggagcgacaagaaccggggcaagagcgacaacgtgcccagcgaggaggtggtgaagaagatgaagaactactggcggcagctgctgaacgccaagctgatcacccagcggaagttcgacaacctgaccaaggccgagcggggcggcctgagcgagctggacaaggccggcttcatcaagcggcagctggtggagacccggcagatcaccaagcacgtggcccagatcctggacagccggatgaacaccaagtacgacgagaacgacaagctgatccgggaggtgaaggtgatcaccctgaagagcaagctggtgagcgacttccggaaggacttccagttctacaaggtgcgggagatcaacaactaccaccacgcccacgacgcctacctgaacgccgtggtgggcaccgccctgatcaagaagtaccccaagctggagagcgagttcgtgtacggcgactacaaggtgtacgacgtgcggaagatgatcgccaagagcgagcaggagatcggcaaggccaccgccaagtacttcttctacagcaacatcatgaacttcttcaagaccgagatcaccctggccaacggcgagatccggaagcggcccctgatcgagaccaacggcgagaccggcgagatcgtgtgggacaagggccgggacttcgccaccgtgcggaaggtgctgagcatgccccaggtgaacatcgtgaagaagaccgaggtgcagaccggcggcttcagcaaggagagcatcctgcccaagcggaacagcgacaagctgatcgcccggaagaaggactgggaccccaagaagtacggcggcttcgacagccccaccgtggcctacagcgtgctggtggtggccaaggtggagaagggcaagagcaagaagctgaagagcgtgaaggagctgctgggcatcaccatcatggagcggagcagcttcgagaagaaccccatcgacttcctggaggccaagggctacaaggaggtgaagaaggacctgatcatcaagctgcccaagtacagcctgttcgagctggagaacggccggaagcggatgctggccagcgccggcgagctgcagaagggcaacgagctggccctgcccagcaagtacgtgaacttcctgtacctggccagccactacgagaagctgaagggcagccccgaggacaacgagcagaagcagctgttcgtggagcagcacaagcactacctggacgagatcatcgagcagatcagcgagttcagcaagcgggtgatcctggccgacgccaacctggacaaggtgctgagcgcctacaacaagcaccgggacaagcccatccgggagcaggccgagaacatcatccacctgttcaccctgaccaacctgggcgcccccgccgccttcaagtacttcgacaccaccatcgaccggaagcggtacaccagcaccaaggaggtgctggacgccaccctgatccaccagagcatcaccggcctgtacgagacccggatcgacctgagccagctgggcggcgacggcagcggcagccccaagaagaagcggaaggtggacggcagccccaagaagaagcggaaggtggacagcggctga

SEQ ID NO: 1140 - DNA, 4107 bp, Artificial Sequence
  Synthetic
atggacaagaagtacagcatcggcctggacatcggcaccaacagcgtgggctgggccgtgatcaccgacgagtacaaggtgcccagcaagaagttcaaggtgctgggcaacaccgaccggcacagcatcaagaagaacctgatcggcgccctgctgttcgacagcggcgagaccgccgaggccacccggctgaagcggaccgcccggcggcggtacacccggcggaagaaccggatctgctacctgcaggagatcttcagcaacgagatggccaaggtggacgacagcttcttccaccggctggaggagagcttcctggtggaggaggacaagaagcacgagcggcaccccatcttcggcaacatcgtggacgaggtggcctaccacgagaagtaccccaccatctaccacctgcggaagaagctggtggacagcaccgacaaggccgacctgcggctgatctacctggccctggcccacatgatcaagttccggggccacttcctgatcgagggcgacctgaaccccgacaacagcgacgtggacaagctgttcatccagctggtgcagacctacaaccagctgttcgaggagaaccccatcaacgccagcggcgtggacgccaaggccatcctgagcgcccggctgagcaagagccggcggctggagaacctgatcgcccagctgcccggcgagaagaagaacggcctgttcggcaacctgatcgccctgagcctgggcctgacccccaacttcaagagcaacttcgacctggccgaggacgccaagctgcagctgagcaaggacacctacgacgacgacctggacaacctgctggcccagatcggcgaccagtacgccgacctgttcctggccgccaagaacctgagcgacgccatcctgctgagcgacatcctgcgggtgaacaccgagatcaccaaggcccccctgagcgccagcatgatcaagcggtacgacgagcaccaccaggacctgaccctgctgaaggccctggtgcggcagcagctgcccgagaagtacaaggagatcttcttcgaccagagcaagaacggctacgccggctacatcgacggcggcgccagccaggaggagttctacaagttcatcaagcccatcctggagaagatggacggcaccgaggagctgctggtgaagctgaaccgggaggacctgctgcggaagcagcggaccttcgacaacggcagcatcccccaccagatccacctgggcgagctgcacgccatcctgcggcggcaggaggacttctaccccttcctgaaggacaaccgggagaagatcgagaagatcctgaccttccggatcccctactacgtgggccccctggcccggggcaacagccggttcgcctggatgacccggaagagcgaggagaccatcaccccctggaacttcgaggaggtggtggacaagggcgccagcgcccagagcttcatcgagcggatgaccaacttcgacaagaacctgcccaacgagaaggtgctgcccaagcacagcctgctgtacgagtacttcaccgtgtacaacgagctgaccaaggtgaagtacgtgaccgagggcatgcggaagcccgccttcctgagcggcgagcagaagaaggccatcgtggacctgctgttcaagaccaaccggaaggtgaccgtgaagcagctgaaggaggactacttcaagaagatcgagtgcttcgacagcgtggagatcagcggcgtggaggaccggttcaacgccagcctgggcacctaccacgacctgctgaagatcatcaaggacaaggacttcctggacaacgaggagaacgaggacatcctggaggacatcgtgctgaccctgaccctgttcgaggaccgggagatgatcgaggagcggctgaagacctacgcccacctgttcgacgacaaggtgatgaagcagctgaagcggcggcggtacaccggctggggccggctgagccggaagctgatcaacggcatccgggacaagcagagcggcaagaccatcctggacttcctgaagagcgacggcttcgccaaccggaacttcatgcagctgatccacgacgacagcctgaccttcaaggaggacatccagaaggcccaggtgagcggccagggcgacagcctgcacgagcacatcgccaacctggccggcagccccgccatcaagaagggcatcctgcagaccgtgaaggtggtggacgagctggtgaaggtgatgggccggcacaagcccgagaacatcgtgatcgagatggcccgggagaaccagaccacccagaagggccagaagaacagccgggagcggatgaagcggatcgaggagggcatcaaggagctgggcagccagatcctgaaggagcaccccgtggagaacacccagctgcagaacgagaagctgtacctgtactacctgcagaacggccgggacatgtacgtggaccaggagctggacatcaaccggctgagcgactacgacgtggaccacatcgtgccccagagcttcctgaaggacgacagcatcgacaacaaggtgctgacccggagcgacaagaaccggggcaagagcgacaacgtgcccagcgaggaggtggtgaagaagatgaagaactactggcggcagctgctgaacgccaagctgatcacccagcggaagttcgacaacctgaccaaggccgagcggggcggcctgagcgagctggacaaggccggcttcatcaagcggcagctggtggagacccggcagatcaccaagcacgtggcccagatcctggacagccggatgaacaccaagtacgacgagaacgacaagctgatccgggaggtgaaggtgatcaccctgaagagcaagctggtgagcgacttccggaaggacttccagttctacaaggtgcgggagatcaacaactaccaccacgcccacgacgcctacctgaacgccgtggtgggcaccgccctgatcaagaagtaccccaagctggagagcgagttcgtgtacggcgactacaaggtgtacgacgtgcggaagatgatcgccaagagcgagcaggagatcggcaaggccaccgccaagtacttcttctacagcaacatcatgaacttcttcaagaccgagatcaccctggccaacggcgagatccggaagcggcccctgatcgagaccaacggcgagaccggcgagatcgtgtgggacaagggccgggacttcgccaccgtgcggaaggtgctgagcatgccccaggtgaacatcgtgaagaagaccgaggtgcagaccggcggcttcagcaaggagagcatcctgcccaagcggaacagcgacaagctgatcgcccggaagaaggactgggaccccaagaagtacggcggcttcgacagccccaccgtggcctacagcgtgctggtggtggccaaggtggagaagggcaagagcaagaagctgaagagcgtgaaggagctgctgggcatcaccatcatggagcggagcagcttcgagaagaaccccatcgacttcctggaggccaagggctacaaggaggtgaagaaggacctgatcatcaagctgcccaagtacagcctgttcgagctggagaacggccggaagcggatgctggccagcgccggcgagctgcagaagggcaacgagctggccctgcccagcaagtacgtgaacttcctgtacctggccagccactacgagaagctgaagggcagccccgaggacaacgagcagaagcagctgttcgtggagcagcacaagcactacctggacgagatcatcgagcagatcagcgagttcagcaagcgggtgatcctggccgacgccaacctggacaaggtgctgagcgcctacaacaagcaccgggacaagcccatccgggagcaggccgagaacatcatccacctgttcaccctgaccaacctgggcgcccccgccgccttcaagtacttcgacaccaccatcgaccggaagcggtacaccagcaccaaggaggtgctggacgccaccctgatccaccagagcatcaccggcctgtacgagacccggatcgacctgagccagctgggcggcgactga

SEQ ID NO: 1141 - DNA, 4140 bp, Artificial Sequence
  Synthetic
atggacaagaagtacagcatcggcctggccatcggcaccaacagcgtgggctgggccgtgatcaccgacgagtacaaggtgcccagcaagaagttcaaggtgctgggcaacaccgaccggcacagcatcaagaagaacctgatcggcgccctgctgttcgacagcggcgagaccgccgaggccacccggctgaagcggaccgcccggcggcggtacacccggcggaagaaccggatctgctacctgcaggagatcttcagcaacgagatggccaaggtggacgacagcttcttccaccggctggaggagagcttcctggtggaggaggacaagaagcacgagcggcaccccatcttcggcaacatcgtggacgaggtggcctaccacgagaagtaccccaccatctaccacctgcggaagaagctggtggacagcaccgacaaggccgacctgcggctgatctacctggccctggcccacatgatcaagttccggggccacttcctgatcgagggcgacctgaaccccgacaacagcgacgtggacaagctgttcatccagctggtgcagacctacaaccagctgttcgaggagaaccccatcaacgccagcggcgtggacgccaaggccatcctgagcgcccggctgagcaagagccggcggctggagaacctgatcgcccagctgcccggcgagaagaagaacggcctgttcggcaacctgatcgccctgagcctgggcctgacccccaacttcaagagcaacttcgacctggccgaggacgccaagctgcagctgagcaaggacacctacgacgacgacctggacaacctgctggcccagatcggcgaccagtacgccgacctgttcctggccgccaagaacctgagcgacgccatcctgctgagcgacatcctgcgggtgaacaccgagatcaccaaggcccccctgagcgccagcatgatcaagcggtacgacgagcaccaccaggacctgaccctgctgaaggccctggtgcggcagcagctgcccgagaagtacaaggagatcttcttcgaccagagcaagaacggctacgccggctacatcgacggcggcgccagccaggaggagttctacaagttcatcaagcccatcctggagaagatggacggcaccgaggagctgctggtgaagctgaaccgggaggacctgctgcggaagcagcggaccttcgacaacggcagcatcccccaccagatccacctgggcgagctgcacgccatcctgcggcggcaggaggacttctaccccttcctgaaggacaaccgggagaagatcgagaagatcctgaccttccggatcccctactacgtgggccccctggcccggggcaacagccggttcgcctggatgacccggaagagcgaggagaccatcaccccctggaacttcgaggaggtggtggacaagggcgccagcgcccagagcttcatcgagcggatgaccaacttcgacaagaacctgcccaacgagaaggtgctgcccaagcacagcctgctgtacgagtacttcaccgtgtacaacgagctgaccaaggtgaagtacgtgaccgagggcatgcggaagcccgccttcctgagcggcgagcagaagaaggccatcgtggacctgctgttcaagaccaaccggaaggtgaccgtgaagcagctgaaggaggactacttcaagaagatcgagtgcttcgacagcgtggagatcagcggcgtggaggaccggttcaacgccagcctgggcacctaccacgacctgctgaagatcatcaaggacaaggacttcctggacaacgaggagaacgaggacatcctggaggacatcgtgctgaccctgaccctgttcgaggaccgggagatgatcgaggagcggctgaagacctacgcccacctgttcgacgacaaggtgatgaagcagctgaagcggcggcggtacaccggctggggccggctgagccggaagctgatcaacggcatccgggacaagcagagcggcaagaccatcctggacttcctgaagagcgacggcttcgccaaccggaacttcatgcagctgatccacgacgacagcctgaccttcaaggaggacatccagaaggcccaggtgagcggccagggcgacagcctgcacgagcacatcgccaacctggccggcagccccgccatcaagaagggcatcctgcagaccgtgaaggtggtggacgagctggtgaaggtgatgggccggcacaagcccgagaacatcgtgatcgagatggcccgggagaaccagaccacccagaagggccagaagaacagccgggagcggatgaagcggatcgaggagggcatcaaggagctgggcagccagatcctgaaggagcaccccgtggagaacacccagctgcagaacgagaagctgtacctgtactacctgcagaacggccgggacatgtacgtggaccaggagctggacatcaaccggctgagcgactacgacgtggaccacatcgtgccccagagcttcctgaaggacgacagcatcgacaacaaggtgctgacccggagcgacaagaaccggggcaagagcgacaacgtgcccagcgaggaggtggtgaagaagatgaagaactactggcggcagctgctgaacgccaagctgatcacccagcggaagttcgacaacctgaccaaggccgagcggggcggcctgagcgagctggacaaggccggcttcatcaagcggcagctggtggagacccggcagatcaccaagcacgtggcccagatcctggacagccggatgaacaccaagtacgacgagaacgacaagctgatccgggaggtgaaggtgatcaccctgaagagcaagctggtgagcgacttccggaaggacttccagttctacaaggtgcgggagatcaacaactaccaccacgcccacgacgcctacctgaacgccgtggtgggcaccgccctgatcaagaagtaccccaagctggagagcgagttcgtgtacggcgactacaaggtgtacgacgtgcggaagatgatcgccaagagcgagcaggagatcggcaaggccaccgccaagtacttcttctacagcaacatcatgaacttcttcaagaccgagatcaccctggccaacggcgagatccggaagcggcccctgatcgagaccaacggcgagaccggcgagatcgtgtgggacaagggccgggacttcgccaccgtgcggaaggtgctgagcatgccccaggtgaacatcgtgaagaagaccgaggtgcagaccggcggcttcagcaaggagagcatcctgcccaagcggaacagcgacaagctgatcgcccggaagaaggactgggaccccaagaagtacggcggcttcgacagccccaccgtggcctacagcgtgctggtggtggccaaggtggagaagggcaagagcaagaagctgaagagcgtgaaggagctgctgggcatcaccatcatggagcggagcagcttcgagaagaaccccatcgacttcctggaggccaagggctacaaggaggtgaagaaggacctgatcatcaagctgcccaagtacagcctgttcgagctggagaacggccggaagcggatgctggccagcgccggcgagctgcagaagggcaacgagctggccctgcccagcaagtacgtgaacttcctgtacctggccagccactacgagaagctgaagggcagccccgaggacaacgagcagaagcagctgttcgtggagcagcacaagcactacctggacgagatcatcgagcagatcagcgagttcagcaagcgggtgatcctggccgacgccaacctggacaaggtgctgagcgcctacaacaagcaccgggacaagcccatccgggagcaggccgagaacatcatccacctgttcaccctgaccaacctgggcgcccccgccgccttcaagtacttcgacaccaccatcgaccggaagcggtacaccagcaccaaggaggtgctggacgccaccctgatccaccagagcatcaccggcctgtacgagacccggatcgacctgagccagctgggcggcgacggcggcggcagccccaagaagaagcggaaggtgtga

SEQ ID NO: 1142 - DNA, 4179 bp, Artificial Sequence
  Synthetic
atggacaagaagtacagcatcggcctggccatcggcaccaacagcgtgggctgggccgtgatcaccgacgagtacaaggtgcccagcaagaagttcaaggtgctgggcaacaccgaccggcacagcatcaagaagaacctgatcggcgccctgctgttcgacagcggcgagaccgccgaggccacccggctgaagcggaccgcccggcggcggtacacccggcggaagaaccggatctgctacctgcaggagatcttcagcaacgagatggccaaggtggacgacagcttcttccaccggctggaggagagcttcctggtggaggaggacaagaagcacgagcggcaccccatcttcggcaacatcgtggacgaggtggcctaccacgagaagtaccccaccatctaccacctgcggaagaagctggtggacagcaccgacaaggccgacctgcggctgatctacctggccctggcccacatgatcaagttccggggccacttcctgatcgagggcgacctgaaccccgacaacagcgacgtggacaagctgttcatccagctggtgcagacctacaaccagctgttcgaggagaaccccatcaacgccagcggcgtggacgccaaggccatcctgagcgcccggctgagcaagagccggcggctggagaacctgatcgcccagctgcccggcgagaagaagaacggcctgttcggcaacctgatcgccctgagcctgggcctgacccccaacttcaagagcaacttcgacctggccgaggacgccaagctgcagctgagcaaggacacctacgacgacgacctggacaacctgctggcccagatcggcgaccagtacgccgacctgttcctggccgccaagaacctgagcgacgccatcctgctgagcgacatcctgcgggtgaacaccgagatcaccaaggcccccctgagcgccagcatgatcaagcggtacgacgagcaccaccaggacctgaccctgctgaaggccctggtgcggcagcagctgcccgagaagtacaaggagatcttcttcgaccagagcaagaacggctacgccggctacatcgacggcggcgccagccaggaggagttctacaagttcatcaagcccatcctggagaagatggacggcaccgaggagctgctggtgaagctgaaccgggaggacctgctgcggaagcagcggaccttcgacaacggcagcatcccccaccagatccacctgggcgagctgcacgccatcctgcggcggcaggaggacttctaccccttcctgaaggacaaccgggagaagatcgagaagatcctgaccttccggatcccctactacgtgggccccctggcccggggcaacagccggttcgcctggatgacccggaagagcgaggagaccatcaccccctggaacttcgaggaggtggtggacaagggcgccagcgcccagagcttcatcgagcggatgaccaacttcgacaagaacctgcccaacgagaaggtgctgcccaagcacagcctgctgtacgagtacttcaccgtgtacaacgagctgaccaaggtgaagtacgtgaccgagggcatgcggaagcccgccttcctgagcggcgagcagaagaaggccatcgtggacctgctgttcaagaccaaccggaaggtgaccgtgaagcagctgaaggaggactacttcaagaagatcgagtgcttcgacagcgtggagatcagcggcgtggaggaccggttcaacgccagcctgggcacctaccacgacctgctgaagatcatcaaggacaaggacttcctggacaacgaggagaacgaggacatcctggaggacatcgtgctgaccctgaccctgttcgaggaccgggagatgatcgaggagcggctgaagacctacgcccacctgttcgacgacaaggtgatgaagcagctgaagcggcggcggtacaccggctggggccggctgagccggaagctgatcaacggcatccgggacaagcagagcggcaagaccatcctggacttcctgaagagcgacggcttcgccaaccggaacttcatgcagctgatccacgacgacagcctgaccttcaaggaggacatccagaaggcccaggtgagcggccagggcgacagcctgcacgagcacatcgccaacctggccggcagccccgccatcaagaagggcatcctgcagaccgtgaaggtggtggacgagctggtgaaggtgatgggccggcacaagcccgagaacatcgtgatcgagatggcccgggagaaccagaccacccagaagggccagaagaacagccgggagcggatgaagcggatcgaggagggcatcaaggagctgggcagccagatcctgaaggagcaccccgtggagaacacccagctgcagaacgagaagctgtacctgtactacctgcagaacggccgggacatgtacgtggaccaggagctggacatcaaccggctgagcgactacgacgtggaccacatcgtgccccagagcttcctgaaggacgacagcatcgacaacaaggtgctgacccggagcgacaagaaccggggcaagagcgacaacgtgcccagcgaggaggtggtgaagaagatgaagaactactggcggcagctgctgaacgccaagctgatcacccagcggaagttcgacaacctgaccaaggccgagcggggcggcctgagcgagctggacaaggccggcttcatcaagcggcagctggtggagacccggcagatcaccaagcacgtggcccagatcctggacagccggatgaacaccaagtacgacgagaacgacaagctgatccgggaggtgaaggtgatcaccctgaagagcaagctggtgagcgacttccggaaggacttccagttctacaaggtgcgggagatcaacaactaccaccacgcccacgacgcctacctgaacgccgtggtgggcaccgccctgatcaagaagtaccccaagctggagagcgagttcgtgtacggcgactacaaggtgtacgacgtgcggaagatgatcgccaagagcgagcaggagatcggcaaggccaccgccaagtacttcttctacagcaacatcatgaacttcttcaagaccgagatcaccctggccaacggcgagatccggaagcggcccctgatcgagaccaacggcgagaccggcgagatcgtgtgggacaagggccgggacttcgccaccgtgcggaaggtgctgagcatgccccaggtgaacatcgtgaagaagaccgaggtgcagaccggcggcttcagcaaggagagcatcctgcccaagcggaacagcgacaagctgatcgcccggaagaaggactgggaccccaagaagtacggcggcttcgacagccccaccgtggcctacagcgtgctggtggtggccaaggtggagaagggcaagagcaagaagctgaagagcgtgaaggagctgctgggcatcaccatcatggagcggagcagcttcgagaagaaccccatcgacttcctggaggccaagggctacaaggaggtgaagaaggacctgatcatcaagctgcccaagtacagcctgttcgagctggagaacggccggaagcggatgctggccagcgccggcgagctgcagaagggcaacgagctggccctgcccagcaagtacgtgaacttcctgtacctggccagccactacgagaagctgaagggcagccccgaggacaacgagcagaagcagctgttcgtggagcagcacaagcactacctggacgagatcatcgagcagatcagcgagttcagcaagcgggtgatcctggccgacgccaacctggacaaggtgctgagcgcctacaacaagcaccgggacaagcccatccgggagcaggccgagaacatcatccacctgttcaccctgaccaacctgggcgcccccgccgccttcaagtacttcgacaccaccatcgaccggaagcggtacaccagcaccaaggaggtgctggacgccaccctgatccaccagagcatcaccggcctgtacgagacccggatcgacctgagccagctgggcggcgacggcagcggcagccccaagaagaagcggaaggtggacggcagccccaagaagaagcggaaggtggacagcggctga

SEQ ID NO: 1143 - DNA, 4107 bp, Artificial Sequence
  Synthetic
atggacaagaagtacagcatcggcctggccatcggcaccaacagcgtgggctgggccgtgatcaccgacgagtacaaggtgcccagcaagaagttcaaggtgctgggcaacaccgaccggcacagcatcaagaagaacctgatcggcgccctgctgttcgacagcggcgagaccgccgaggccacccggctgaagcggaccgcccggcggcggtacacccggcggaagaaccggatctgctacctgcaggagatcttcagcaacgagatggccaaggtggacgacagcttcttccaccggctggaggagagcttcctggtggaggaggacaagaagcacgagcggcaccccatcttcggcaacatcgtggacgaggtggcctaccacgagaagtaccccaccatctaccacctgcggaagaagctggtggacagcaccgacaaggccgacctgcggctgatctacctggccctggcccacatgatcaagttccggggccacttcctgatcgagggcgacctgaaccccgacaacagcgacgtggacaagctgttcatccagctggtgcagacctacaaccagctgttcgaggagaaccccatcaacgccagcggcgtggacgccaaggccatcctgagcgcccggctgagcaagagccggcggctggagaacctgatcgcccagctgcccggcgagaagaagaacggcctgttcggcaacctgatcgccctgagcctgggcctgacccccaacttcaagagcaacttcgacctggccgaggacgccaagctgcagctgagcaaggacacctacgacgacgacctggacaacctgctggcccagatcggcgaccagtacgccgacctgttcctggccgccaagaacctgagcgacgccatcctgctgagcgacatcctgcgggtgaacaccgagatcaccaaggcccccctgagcgccagcatgatcaagcggtacgacgagcaccaccaggacctgaccctgctgaaggccctggtgcggcagcagctgcccgagaagtacaaggagatcttcttcgaccagagcaagaacggctacgccggctacatcgacggcggcgccagccaggaggagttctacaagttcatcaagcccatcctggagaagatggacggcaccgaggagctgctggtgaagctgaaccgggaggacctgctgcggaagcagcggaccttcgacaacggcagcatcccccaccagatccacctgggcgagctgcacgccatcctgcggcggcaggaggacttctaccccttcctgaaggacaaccgggagaagatcgagaagatcctgaccttccggatcccctactacgtgggccccctggcccggggcaacagccggttcgcctggatgacccggaagagcgaggagaccatcaccccctggaacttcgaggaggtggtggacaagggcgccagcgcccagagcttcatcgagcggatgaccaacttcgacaagaacctgcccaacgagaaggtgctgcccaagcacagcctgctgtacgagtacttcaccgtgtacaacgagctgaccaaggtgaagtacgtgaccgagggcatgcggaagcccgccttcctgagcggcgagcagaagaaggccatcgtggacctgctgttcaagaccaaccggaaggtgaccgtgaagcagctgaaggaggactacttcaagaagatcgagtgcttcgacagcgtggagatcagcggcgtggaggaccggttcaacgccagcctgggcacctaccacgacctgctgaagatcatcaaggacaaggacttcctggacaacgaggagaacgaggacatcctggaggacatcgtgctgaccctgaccctgttcgaggaccgggagatgatcgaggagcggctgaagacctacgcccacctgttcgacgacaaggtgatgaagcagctgaagcggcggcggtacaccggctggggccggctgagccggaagctgatcaacggcatccgggacaagcagagcggcaagaccatcctggacttcctgaagagcgacggcttcgccaaccggaacttcatgcagctgatccacgacgacagcctgaccttcaaggaggacatccagaaggcccaggtgagcggccagggcgacagcctgcacgagcacatcgccaacctggccggcagccccgccatcaagaagggcatcctgcagaccgtgaaggtggtggacgagctggtgaaggtgatgggccggcacaagcccgagaacatcgtgatcgagatggcccgggagaaccagaccacccagaagggccagaagaacagccgggagcggatgaagcggatcgaggagggcatcaaggagctgggcagccagatcctgaaggagcaccccgtggagaacacccagctgcagaacgagaagctgtacctgtactacctgcagaacggccgggacatgtacgtggaccaggagctggacatcaaccggctgagcgactacgacgtggaccacatcgtgccccagagcttcctgaaggacgacagcatcgacaacaaggtgctgacccggagcgacaagaaccggggcaagagcgacaacgtgcccagcgaggaggtggtgaagaagatgaagaactactggcggcagctgctgaacgccaagctgatcacccagcggaagttcgacaacctgaccaaggccgagcggggcggcctgagcgagctggacaaggccggcttcatcaagcggcagctggtggagacccggcagatcaccaagcacgtggcccagatcctggacagccggatgaacaccaagtacgacgagaacgacaagctgatccgggaggtgaaggtgatcaccctgaagagcaagctggtgagcgacttccggaaggacttccagttctacaaggtgcgggagatcaacaactaccaccacgcccacgacgcctacctgaacgccgtggtgggcaccgccctgatcaagaagtaccccaagctggagagcgagttcgtgtacggcgactacaaggtgtacgacgtgcggaagatgatcgccaagagcgagcaggagatcggcaaggccaccgccaagtacttcttctacagcaacatcatgaacttcttcaagaccgagatcaccctggccaacggcgagatccggaagcggcccctgatcgagaccaacggcgagaccggcgagatcgtgtgggacaagggccgggacttcgccaccgtgcggaaggtgctgagcatgccccaggtgaacatcgtgaagaagaccgaggtgcagaccggcggcttcagcaaggagagcatcctgcccaagcggaacagcgacaagctgatcgcccggaagaaggactgggaccccaagaagtacggcggcttcgacagccccaccgtggcctacagcgtgctggtggtggccaaggtggagaagggcaagagcaagaagctgaagagcgtgaaggagctgctgggcatcaccatcatggagcggagcagcttcgagaagaaccccatcgacttcctggaggccaagggctacaaggaggtgaagaaggacctgatcatcaagctgcccaagtacagcctgttcgagctggagaacggccggaagcggatgctggccagcgccggcgagctgcagaagggcaacgagctggccctgcccagcaagtacgtgaacttcctgtacctggccagccactacgagaagctgaagggcagccccgaggacaacgagcagaagcagctgttcgtggagcagcacaagcactacctggacgagatcatcgagcagatcagcgagttcagcaagcgggtgatcctggccgacgccaacctggacaaggtgctgagcgcctacaacaagcaccgggacaagcccatccgggagcaggccgagaacatcatccacctgttcaccctgaccaacctgggcgcccccgccgccttcaagtacttcgacaccaccatcgaccggaagcggtacaccagcaccaaggaggtgctggacgccaccctgatccaccagagcatcaccggcctgtacgagacccggatcgacctgagccagctgggcggcgactga

SEQ ID NO: 1144 - DNA, 4140 bp, Artificial Sequence
  Synthetic
atggacaagaagtacagcatcggcctggccatcggcaccaacagcgtgggctgggccgtgatcaccgacgagtacaaggtgcccagcaagaagttcaaggtgctgggcaacaccgaccggcacagcatcaagaagaacctgatcggcgccctgctgttcgacagcggcgagaccgccgaggccacccggctgaagcggaccgcccggcggcggtacacccggcggaagaaccggatctgctacctgcaggagatcttcagcaacgagatggccaaggtggacgacagcttcttccaccggctggaggagagcttcctggtggaggaggacaagaagcacgagcggcaccccatcttcggcaacatcgtggacgaggtggcctaccacgagaagtaccccaccatctaccacctgcggaagaagctggtggacagcaccgacaaggccgacctgcggctgatctacctggccctggcccacatgatcaagttccggggccacttcctgatcgagggcgacctgaaccccgacaacagcgacgtggacaagctgttcatccagctggtgcagacctacaaccagctgttcgaggagaaccccatcaacgccagcggcgtggacgccaaggccatcctgagcgcccggctgagcaagagccggcggctggagaacctgatcgcccagctgcccggcgagaagaagaacggcctgttcggcaacctgatcgccctgagcctgggcctgacccccaacttcaagagcaacttcgacctggccgaggacgccaagctgcagctgagcaaggacacctacgacgacgacctggacaacctgctggcccagatcggcgaccagtacgccgacctgttcctggccgccaagaacctgagcgacgccatcctgctgagcgacatcctgcgggtgaacaccgagatcaccaaggcccccctgagcgccagcatgatcaagcggtacgacgagcaccaccaggacctgaccctgctgaaggccctggtgcggcagcagctgcccgagaagtacaaggagatcttcttcgaccagagcaagaacggctacgccggctacatcgacggcggcgccagccaggaggagttctacaagttcatcaagcccatcctggagaagatggacggcaccgaggagctgctggtgaagctgaaccgggaggacctgctgcggaagcagcggaccttcgacaacggcagcatcccccaccagatccacctgggcgagctgcacgccatcctgcggcggcaggaggacttctaccccttcctgaaggacaaccgggagaagatcgagaagatcctgaccttccggatcccctactacgtgggccccctggcccggggcaacagccggttcgcctggatgacccggaagagcgaggagaccatcaccccctggaacttcgaggaggtggtggacaagggcgccagcgcccagagcttcatcgagcggatgaccaacttcgacaagaacctgcccaacgagaaggtgctgcccaagcacagcctgctgtacgagtacttcaccgtgtacaacgagctgaccaaggtgaagtacgtgaccgagggcatgcggaagcccgccttcctgagcggcgagcagaagaaggccatcgtggacctgctgttcaagaccaaccggaaggtgaccgtgaagcagctgaaggaggactacttcaagaagatcgagtgcttcgacagcgtggagatcagcggcgtggaggaccggttcaacgccagcctgggcacctaccacgacctgctgaagatcatcaaggacaaggacttcctggacaacgaggagaacgaggacatcctggaggacatcgtgctgaccctgaccctgttcgaggaccgggagatgatcgaggagcggctgaagacctacgcccacctgttcgacgacaaggtgatgaagcagctgaagcggcggcggtacaccggctggggccggctgagccggaagctgatcaacggcatccgggacaagcagagcggcaagaccatcctggacttcctgaagagcgacggcttcgccaaccggaacttcatgcagctgatccacgacgacagcctgaccttcaaggaggacatccagaaggcccaggtgagcggccagggcgacagcctgcacgagcacatcgccaacctggccggcagccccgccatcaagaagggcatcctgcagaccgtgaaggtggtggacgagctggtgaaggtgatgggccggcacaagcccgagaacatcgtgatcgagatggcccgggagaaccagaccacccagaagggccagaagaacagccgggagcggatgaagcggatcgaggagggcatcaaggagctgggcagccagatcctgaaggagcaccccgtggagaacacccagctgcagaacgagaagctgtacctgtactacctgcagaacggccgggacatgtacgtggaccaggagctggacatcaaccggctgagcgactacgacgtggacgccatcgtgccccagagcttcctgaaggacgacagcatcgacaacaaggtgctgacccggagcgacaagaaccggggcaagagcgacaacgtgcccagcgaggaggtggtgaagaagatgaagaactactggcggcagctgctgaacgccaagctgatcacccagcggaagttcgacaacctgaccaaggccgagcggggcggcctgagcgagctggacaaggccggcttcatcaagcggcagctggtggagacccggcagatcaccaagcacgtggcccagatcctggacagccggatgaacaccaagtacgacgagaacgacaagctgatccgggaggtgaaggtgatcaccctgaagagcaagctggtgagcgacttccggaaggacttccagttctacaaggtgcgggagatcaacaactaccaccacgcccacgacgcctacctgaacgccgtggtgggcaccgccctgatcaagaagtaccccaagctggagagcgagttcgtgtacggcgactacaaggtgtacgacgtgcggaagatgatcgccaagagcgagcaggagatcggcaaggccaccgccaagtacttcttctacagcaacatcatgaacttcttcaagaccgagatcaccctggccaacggcgagatccggaagcggcccctgatcgagaccaacggcgagaccggcgagatcgtgtgggacaagggccgggacttcgccaccgtgcggaaggtgctgagcatgccccaggtgaacatcgtgaagaagaccgaggtgcagaccggcggcttcagcaaggagagcatcctgcccaagcggaacagcgacaagctgatcgcccggaagaaggactgggaccccaagaagtacggcggcttcgacagccccaccgtggcctacagcgtgctggtggtggccaaggtggagaagggcaagagcaagaagctgaagagcgtgaaggagctgctgggcatcaccatcatggagcggagcagcttcgagaagaaccccatcgacttcctggaggccaagggctacaaggaggtgaagaaggacctgatcatcaagctgcccaagtacagcctgttcgagctggagaacggccggaagcggatgctggccagcgccggcgagctgcagaagggcaacgagctggccctgcccagcaagtacgtgaacttcctgtacctggccagccactacgagaagctgaagggcagccccgaggacaacgagcagaagcagctgttcgtggagcagcacaagcactacctggacgagatcatcgagcagatcagcgagttcagcaagcgggtgatcctggccgacgccaacctggacaaggtgctgagcgcctacaacaagcaccgggacaagcccatccgggagcaggccgagaacatcatccacctgttcaccctgaccaacctgggcgcccccgccgccttcaagtacttcgacaccaccatcgaccggaagcggtacaccagcaccaaggaggtgctggacgccaccctgatccaccagagcatcaccggcctgtacgagacccggatcgacctgagccagctgggcggcgacggcggcggcagccccaagaagaagcggaaggtgtga

SEQ ID NO: 1145 - DNA, 4179 bp, Artificial Sequence
  Synthetic
atggacaagaagtacagcatcggcctggccatcggcaccaacagcgtgggctgggccgtgatcaccgacgagtacaaggtgcccagcaagaagttcaaggtgctgggcaacaccgaccggcacagcatcaagaagaacctgatcggcgccctgctgttcgacagcggcgagaccgccgaggccacccggctgaagcggaccgcccggcggcggtacacccggcggaagaaccggatctgctacctgcaggagatcttcagcaacgagatggccaaggtggacgacagcttcttccaccggctggaggagagcttcctggtggaggaggacaagaagcacgagcggcaccccatcttcggcaacatcgtggacgaggtggcctaccacgagaagtaccccaccatctaccacctgcggaagaagctggtggacagcaccgacaaggccgacctgcggctgatctacctggccctggcccacatgatcaagttccggggccacttcctgatcgagggcgacctgaaccccgacaacagcgacgtggacaagctgttcatccagctggtgcagacctacaaccagctgttcgaggagaaccccatcaacgccagcggcgtggacgccaaggccatcctgagcgcccggctgagcaagagccggcggctggagaacctgatcgcccagctgcccggcgagaagaagaacggcctgttcggcaacctgatcgccctgagcctgggcctgacccccaacttcaagagcaacttcgacctggccgaggacgccaagctgcagctgagcaaggacacctacgacgacgacctggacaacctgctggcccagatcggcgaccagtacgccgacctgttcctggccgccaagaacctgagcgacgccatcctgctgagcgacatcctgcgggtgaacaccgagatcaccaaggcccccctgagcgccagcatgatcaagcggtacgacgagcaccaccaggacctgaccctgctgaaggccctggtgcggcagcagctgcccgagaagtacaaggagatcttcttcgaccagagcaagaacggctacgccggctacatcgacggcggcgccagccaggaggagttctacaagttcatcaagcccatcctggagaagatggacggcaccgaggagctgctggtgaagctgaaccgggaggacctgctgcggaagcagcggaccttcgacaacggcagcatcccccaccagatccacctgggcgagctgcacgccatcctgcggcggcaggaggacttctaccccttcctgaaggacaaccgggagaagatcgagaagatcctgaccttccggatcccctactacgtgggccccctggcccggggcaacagccggttcgcctggatgacccggaagagcgaggagaccatcaccccctggaacttcgaggaggtggtggacaagggcgccagcgcccagagcttcatcgagcggatgaccaacttcgacaagaacctgcccaacgagaaggtgctgcccaagcacagcctgctgtacgagtacttcaccgtgtacaacgagctgaccaaggtgaagtacgtgaccgagggcatgcggaagcccgccttcctgagcggcgagcagaagaaggccatcgtggacctgctgttcaagaccaaccggaaggtgaccgtgaagcagctgaaggaggactacttcaagaagatcgagtgcttcgacagcgtggagatcagcggcgtggaggaccggttcaacgccagcctgggcacctaccacgacctgctgaagatcatcaaggacaaggacttcctggacaacgaggagaacgaggacatcctggaggacatcgtgctgaccctgaccctgttcgaggaccgggagatgatcgaggagcggctgaagacctacgcccacctgttcgacgacaaggtgatgaagcagctgaagcggcggcggtacaccggctggggccggctgagccggaagctgatcaacggcatccgggacaagcagagcggcaagaccatcctggacttcctgaagagcgacggcttcgccaaccggaacttcatgcagctgatccacgacgacagcctgaccttcaaggaggacatccagaaggcccaggtgagcggccagggcgacagcctgcacgagcacatcgccaacctggccggcagccccgccatcaagaagggcatcctgcagaccgtgaaggtggtggacgagctggtgaaggtgatgggccggcacaagcccgagaacatcgtgatcgagatggcccgggagaaccagaccacccagaagggccagaagaacagccgggagcggatgaagcggatcgaggagggcatcaaggagctgggcagccagatcctgaaggagcaccccgtggagaacacccagctgcagaacgagaagctgtacctgtactacctgcagaacggccgggacatgtacgtggaccaggagctggacatcaaccggctgagcgactacgacgtggacgccatcgtgccccagagcttcctgaaggacgacagcatcgacaacaaggtgctgacccggagcgacaagaaccggggcaagagcgacaacgtgcccagcgaggaggtggtgaagaagatgaagaactactggcggcagctgctgaacgccaagctgatcacccagcggaagttcgacaacctgaccaaggccgagcggggcggcctgagcgagctggacaaggccggcttcatcaagcggcagctggtggagacccggcagatcaccaagcacgtggcccagatcctggacagccggatgaacaccaagtacgacgagaacgacaagctgatccgggaggtgaaggtgatcaccctgaagagcaagctggtgagcgacttccggaaggacttccagttctacaaggtgcgggagatcaacaactaccaccacgcccacgacgcctacctgaacgccgtggtgggcaccgccctgatcaagaagtaccccaagctggagagcgagttcgtgtacggcgactacaaggtgtacgacgtgcggaagatgatcgccaagagcgagcaggagatcggcaaggccaccgccaagtacttcttctacagcaacatcatgaacttcttcaagaccgagatcaccctggccaacggcgagatccggaagcggcccctgatcgagaccaacggcgagaccggcgagatcgtgtgggacaagggccgggacttcgccaccgtgcggaaggtgctgagcatgccccaggtgaacatcgtgaagaagaccgaggtgcagaccggcggcttcagcaaggagagcatcctgcccaagcggaacagcgacaagctgatcgcccggaagaaggactgggaccccaagaagtacggcggcttcgacagccccaccgtggcctacagcgtgctggtggtggccaaggtggagaagggcaagagcaagaagctgaagagcgtgaaggagctgctgggcatcaccatcatggagcggagcagcttcgagaagaaccccatcgacttcctggaggccaagggctacaaggaggtgaagaaggacctgatcatcaagctgcccaagtacagcctgttcgagctggagaacggccggaagcggatgctggccagcgccggcgagctgcagaagggcaacgagctggccctgcccagcaagtacgtgaacttcctgtacctggccagccactacgagaagctgaagggcagccccgaggacaacgagcagaagcagctgttcgtggagcagcacaagcactacctggacgagatcatcgagcagatcagcgagttcagcaagcgggtgatcctggccgacgccaacctggacaaggtgctgagcgcctacaacaagcaccgggacaagcccatccgggagcaggccgagaacatcatccacctgttcaccctgaccaacctgggcgcccccgccgccttcaagtacttcgacaccaccatcgaccggaagcggtacaccagcaccaaggaggtgctggacgccaccctgatccaccagagcatcaccggcctgtacgagacccggatcgacctgagccagctgggcggcgacggcagcggcagccccaagaagaagcggaaggtggacggcagccccaagaagaagcggaaggtggacagcggctga

SEQ ID NO: 1146 - DNA, 4107 bp, Artificial Sequence
  Synthetic
atggacaagaagtacagcatcggcctggccatcggcaccaacagcgtgggctgggccgtgatcaccgacgagtacaaggtgcccagcaagaagttcaaggtgctgggcaacaccgaccggcacagcatcaagaagaacctgatcggcgccctgctgttcgacagcggcgagaccgccgaggccacccggctgaagcggaccgcccggcggcggtacacccggcggaagaaccggatctgctacctgcaggagatcttcagcaacgagatggccaaggtggacgacagcttcttccaccggctggaggagagcttcctggtggaggaggacaagaagcacgagcggcaccccatcttcggcaacatcgtggacgaggtggcctaccacgagaagtaccccaccatctaccacctgcggaagaagctggtggacagcaccgacaaggccgacctgcggctgatctacctggccctggcccacatgatcaagttccggggccacttcctgatcgagggcgacctgaaccccgacaacagcgacgtggacaagctgttcatccagctggtgcagacctacaaccagctgttcgaggagaaccccatcaacgccagcggcgtggacgccaaggccatcctgagcgcccggctgagcaagagccggcggctggagaacctgatcgcccagctgcccggcgagaagaagaacggcctgttcggcaacctgatcgccctgagcctgggcctgacccccaacttcaagagcaacttcgacctggccgaggacgccaagctgcagctgagcaaggacacctacgacgacgacctggacaacctgctggcccagatcggcgaccagtacgccgacctgttcctggccgccaagaacctgagcgacgccatcctgctgagcgacatcctgcgggtgaacaccgagatcaccaaggcccccctgagcgccagcatgatcaagcggtacgacgagcaccaccaggacctgaccctgctgaaggccctggtgcggcagcagctgcccgagaagtacaaggagatcttcttcgaccagagcaagaacggctacgccggctacatcgacggcggcgccagccaggaggagttctacaagttcatcaagcccatcctggagaagatggacggcaccgaggagctgctggtgaagctgaaccgggaggacctgctgcggaagcagcggaccttcgacaacggcagcatcccccaccagatccacctgggcgagctgcacgccatcctgcggcggcaggaggacttctaccccttcctgaaggacaaccgggagaagatcgagaagatcctgaccttccggatcccctactacgtgggccccctggcccggggcaacagccggttcgcctggatgacccggaagagcgaggagaccatcaccccctggaacttcgaggaggtggtggacaagggcgccagcgcccagagcttcatcgagcggatgaccaacttcgacaagaacctgcccaacgagaaggtgctgcccaagcacagcctgctgtacgagtacttcaccgtgtacaacgagctgaccaaggtgaagtacgtgaccgagggcatgcggaagcccgccttcctgagcggcgagcagaagaaggccatcgtggacctgctgttcaagaccaaccggaaggtgaccgtgaagcagctgaaggaggactacttcaagaagatcgagtgcttcgacagcgtggagatcagcggcgtggaggaccggttcaacgccagcctgggcacctaccacgacctgctgaagatcatcaaggacaaggacttcctggacaacgaggagaacgaggacatcctggaggacatcgtgctgaccctgaccctgttcgaggaccgggagatgatcgaggagcggctgaagacctacgcccacctgttcgacgacaaggtgatgaagcagctgaagcggcggcggtacaccggctggggccggctgagccggaagctgatcaacggcatccgggacaagcagagcggcaagaccatcctggacttcctgaagagcgacggcttcgccaaccggaacttcatgcagctgatccacgacgacagcctgaccttcaaggaggacatccagaaggcccaggtgagcggccagggcgacagcctgcacgagcacatcgccaacctggccggcagccccgccatcaagaagggcatcctgcagaccgtgaaggtggtggacgagctggtgaaggtgatgggccggcacaagcccgagaacatcgtgatcgagatggcccgggagaaccagaccacccagaagggccagaagaacagccgggagcggatgaagcggatcgaggagggcatcaaggagctgggcagccagatcctgaaggagcaccccgtggagaacacccagctgcagaacgagaagctgtacctgtactacctgcagaacggccgggacatgtacgtggaccaggagctggacatcaaccggctgagcgactacgacgtggacgccatcgtgccccagagcttcctgaaggacgacagcatcgacaacaaggtgctgacccggagcgacaagaaccggggcaagagcgacaacgtgcccagcgaggaggtggtgaagaagatgaagaactactggcggcagctgctgaacgccaagctgatcacccagcggaagttcgacaacctgaccaaggccgagcggggcggcctgagcgagctggacaaggccggcttcatcaagcggcagctggtggagacccggcagatcaccaagcacgtggcccagatcctggacagccggatgaacaccaagtacgacgagaacgacaagctgatccgggaggtgaaggtgatcaccctgaagagcaagctggtgagcgacttccggaaggacttccagttctacaaggtgcgggagatcaacaactaccaccacgcccacgacgcctacctgaacgccgtggtgggcaccgccctgatcaagaagtaccccaagctggagagcgagttcgtgtacggcgactacaaggtgtacgacgtgcggaagatgatcgccaagagcgagcaggagatcggcaaggccaccgccaagtacttcttctacagcaacatcatgaacttcttcaagaccgagatcaccctggccaacggcgagatccggaagcggcccctgatcgagaccaacggcgagaccggcgagatcgtgtgggacaagggccgggacttcgccaccgtgcggaaggtgctgagcatgccccaggtgaacatcgtgaagaagaccgaggtgcagaccggcggcttcagcaaggagagcatcctgcccaagcggaacagcgacaagctgatcgcccggaagaaggactgggaccccaagaagtacggcggcttcgacagccccaccgtggcctacagcgtgctggtggtggccaaggtggagaagggcaagagcaagaagctgaagagcgtgaaggagctgctgggcatcaccatcatggagcggagcagcttcgagaagaaccccatcgacttcctggaggccaagggctacaaggaggtgaagaaggacctgatcatcaagctgcccaagtacagcctgttcgagctggagaacggccggaagcggatgctggccagcgccggcgagctgcagaagggcaacgagctggccctgcccagcaagtacgtgaacttcctgtacctggccagccactacgagaagctgaagggcagccccgaggacaacgagcagaagcagctgttcgtggagcagcacaagcactacctggacgagatcatcgagcagatcagcgagttcagcaagcgggtgatcctggccgacgccaacctggacaaggtgctgagcgcctacaacaagcaccgggacaagcccatccgggagcaggccgagaacatcatccacctgttcaccctgaccaacctgggcgcccccgccgccttcaagtacttcgacaccaccatcgaccggaagcggtacaccagcaccaaggaggtgctggacgccaccctgatccaccagagcatcaccggcctgtacgagacccggatcgacctgagccagctgggcggcgactga

We claim:

1. A guide RNA (gRNA) comprising a 5′ end modification or a 3′ end modification and a conserved portion of an gRNA comprising one or more of:
(a) a shortened hairpin 1 region or a substituted and optionally shortened hairpin 1 region, wherein
(i) at least one of the following pairs of nucleotides are substituted in the substituted and optionally shortened hairpin 1 with Watson-Crick pairing nucleotides: H1-1 and H1-12, H1-2 and H1-11, H1-3 and H1-10, and/or H1-4 and H1-9, and the hairpin 1 region optionally lacks
(aa) any one or two of H1-5 through H1-8,
(bb) one, two, or three of the following pairs of nucleotides: H1-1 and H1-12, H1-2 and H1-11, H1-3 and H1-10 and/or H1-4 and H1-9, and/or
(cc) 1-8 nucleotides of the hairpin 1 region; or
(ii) the shortened hairpin 1 region lacks 6-8 nucleotides, preferably 6 nucleotides; and
(A) one or more of positions H1-1, H1-2, or H1-3 is deleted or substituted relative to SEQ ID NO: 400 and/or
(B) one or more of positions H1-6 through H1-10 is substituted relative to SEQ ID NO: 400; or
(iii) the shortened hairpin 1 region lacks 5-10 nucleotides, preferably 5-6 nucleotides, and one or more of positions N18, H1-12, or n is substituted relative to SEQ ID NO: 400; and/or
(b) a shortened upper stem region, wherein the shortened upper stem region lacks 1-6 nucleotides and wherein the 6, 7, 8, 9, 10, or 11 nucleotides of the shortened upper stem region include less than or equal to 4 substitutions relative to SEQ ID NO: 400; and/or
(c) a substitution relative to SEQ ID NO: 400 at any one or more of LS6, LS7, US3, US10, B3, N7, N15, N17, H2-2 and H2-14, wherein the substituent nucleotide is neither a pyrimidine that is followed by an adenine, nor an adenine that is preceded by a pyrimidine; and/or
(d) an upper stem region, wherein the upper stem modification comprises a modification to any one or more of US1-US12 in the upper stem region.

2. The gRNA of claim 1, wherein position H1-1 is deleted.

3. The gRNA of claim 1, wherein position H1-1 is substituted.

4. The gRNA of any one of claims 1-3, wherein position H1-2 is deleted.

5. The gRNA of any one of claims 1-3, wherein position H1-2 is substituted.

6. The gRNA of any one of claims 1-5, wherein position H1-3 is deleted.

7. The gRNA of any one of claims 1-5, wherein position H1-3 is substituted.

8. The gRNA of any one of claims 1-7, wherein position H1-4 is deleted.

9. The gRNA of any one of claims 1-7, wherein position H1-5 is deleted.

10. The gRNA of any one of claims 1-9, wherein position H1-6 is deleted.

11. The gRNA of any one of claims 1-9, wherein position H1-6 is substituted.

12. The gRNA of any one of claims 1-11, wherein position H1-7 is deleted.

13. The gRNA of any one of claims 1-11, wherein position H1-7 is substituted.

14. The gRNA of any one of claims 1-13, wherein position H1-8 is deleted.

15. The gRNA of any one of claims 1-13, wherein position H1-8 is substituted.

16. The gRNA of any one of claims 1-15, wherein position H1-9 is deleted.

17. The gRNA of any one of claims 1-15, wherein position H1-9 is substituted.

18. The gRNA of any one of claims 1-17, wherein position H1-10 is deleted.

19. The gRNA of any one of claims 1-17, wherein position H1-10 is substituted.

20. The gRNA of any one of claims 1-19, wherein position H1-11 is deleted.

21. The gRNA of any one of claims 1-20, wherein position H1-12 is deleted.

22. The gRNA of any one of claims 1-21, wherein positions H1-11 and H1-12 are deleted.

23. The gRNA of any one of claims 1-22, wherein positions H1-7 is substituted with a G and/or H1-8 is substituted with a C.

24. The gRNA of any one of claims 1-23, wherein positions H1-6 and/or H1-7 are substituted.

25. The gRNA of any one of claims 1-24, wherein position H1-6 is substituted with a C and/or position H1-7 is substituted with a U.

26. The gRNA of any one of claims 1-25, wherein positions H1-1 and/or H1-12 are substituted.

27. The gRNA of any one of claims 1-26, wherein position H1-1 is substituted with a C and/or position H1-12 is substituted with a G.

28. The gRNA of any one of claims 1-27, wherein position N18 is substituted.

29. The gRNA of claim 28, wherein position N18 is substituted with a C.

30. The gRNA of any one of claims 1-29, wherein position H1-12 is substituted.

31. The gRNA of claim 30, wherein position H1-12 is substituted with a C or an A.

32. The gRNA of any one of claims 1-31, wherein position n is substituted.

33. The gRNA of claim 32, wherein position n is substituted with an A.

34. The gRNA of any one of claims 1-33, comprising a shortened upper stem region, wherein the shortened upper stem region lacks 1-6 nucleotides.

35. The gRNA of any one of claims 1-34, wherein the gRNA is an sgRNA.

36. The gRNA of any one of claims 1-35, wherein the gRNA comprises a 5′ end modification.

37. The gRNA of any one of claims 1-36, wherein the gRNA comprises a 3′ end modification.

38. The gRNA of any one of claims 1-37, wherein the gRNA comprises a 5′ end modification and a 3′ end modification.

39. The gRNA of any one of claims 1-38, wherein the gRNA comprises a 3′ tail.

40. The gRNA of claim 39, wherein the 3′ tail comprises 1-2, 1-3, 1-4, 1-5, 1-7, 1-10 nucleotides or 1, 2, 3, 4, 5, 6, 7, 8, 9, or 10 nucleotides.

41. The gRNA of any one of claims 1-38, wherein the gRNA does not comprise a 3′ tail.

42. The gRNA of any one of claims 1-41, comprising a modification in the hairpin region.

43. The gRNA of claim 42, further comprising a 3′ end modification.

44. The gRNA of claim 42, further comprising a 3′ end modification and a 5′ end modification.

45. The gRNA of claim 42, further comprising a 5′ end modification.

46. The gRNA of any one of claims 1-45, further comprising a guide region.

47. The gRNA of claim 46, wherein the guide region is 17, 18, 19, or 20 nucleotides in length.

48. The gRNA of any one of claims 1-47, wherein the 3′ and/or 5′ end modification comprises a protective end modification, optionally a modified nucleotide selected from a 2′-O-methyl (2′-OMe) modified nucleotide, a 2′-O-(2-methoxyethyl) (2′-O-moe) modified nucleotide, a 2′-fluoro (2′-F) modified nucleotide, a phosphorothioate (PS) linkage between nucleotides, an inverted abasic modified nucleotide, or a combination thereof.

49. The gRNA of any one of claims 1-48, comprising a modification in the hairpin region, wherein the modification in the hairpin region comprises a modified nucleotide selected from a 2′-O-methyl (2′-Ome) modified nucleotide, a 2′-fluoro (2′-F) modified nucleotide, a phosphorothioate (PS) linkage between nucleotides, or a combination thereof.

50. The gRNA of any one of claims 1-49, wherein the 3′ and/or 5′ end modification comprises or further comprises a 2′-O-methyl (2′-Ome) modified nucleotide.

51. The gRNA of any one of claims 1-50, wherein the 3′ and/or 5′ end modification comprises or further comprises a 2′-fluoro (2′-F) modified nucleotide.

52. The gRNA of any one of claims 1-51, wherein the 3′ and/or 5′ end modification comprises or further comprises a phosphorothioate (PS) linkage between nucleotides.

53. The gRNA of any one of claims 1-52, wherein the 3′ and/or 5′ end modification comprises or further comprises an inverted abasic modified nucleotide.

54. The gRNA of any one of claims 1-53, comprising a modification in the hairpin region, wherein the modification in the hairpin region comprises or further comprises a 2′-O-methyl (2′-Ome) modified nucleotide.

55. The gRNA of any one of claims 1-54, comprising a modification in the hairpin region, wherein the modification in the hairpin region comprises or further comprises a 2′-fluoro (2′-F) modified nucleotide.

56. The gRNA of any one of claims 1-55, wherein the sgRNA comprise a 3′ tail, wherein the 3′ tail comprises a modification of any one or more of the nucleotides present in the 3′ tail.

57. The gRNA of claim 56, wherein the 3′ tail is fully modified.

58. The gRNA of any one of claims 1-57, wherein the upper stem region comprises at least one modification.

59. The gRNA of claim 58, wherein the upper stem modification comprises any one or more of:
i. a modification of any one or more of US1-US12 in the upper stem region; and
ii. a modification of at least 1, 2, 3, 4, 5, 6, 7, 8, 9, 10, 11, or all 12 nucleotides in the upper stem region.

60. The gRNA of claim 59, wherein the upper stem modification comprises one or more of:
i. a 2′-OMe modified nucleotide;
ii. a 2′-O-moe modified nucleotide;
iii. a 2′-F modified nucleotide; and
iv. combinations of one or more of (i.)-(iii.).

61. The gRNA of any one of claims 1-60, comprising a nucleotide sequence having at least 99, 98, 97, 96, 95, 94, 93, 92, 91, 90, 85, 80, 75, or 70% identity to the nucleotide sequence of any one of SEQ ID NOs: 1-98, 201-294, 401-494, 601-698, or 801-875.

62. The gRNA of any one of claims 1-61, comprising a nucleotide sequence having at least 99, 98, 97, 96, 95, 94, 93, 92, 91, 90, 85, 80, 75, or 70% identity to the nucleotide sequence of any one of SEQ ID Nos: 101-198, 301-394, 501-594, 701-798, or 901-975, wherein the modification at each nucleotide of the gRNA that corresponds to a nucleotide of the reference sequence identifier in Table 1A is identical to or equivalent to the modification shown in the reference sequence identifier in Table 1A.

63. A guide RNA comprising any of SEQ ID NOs: 1-98, 201-294, 401-494, 601-698, or 801-875.

64. A guide RNA comprising any of SEQ ID NOs: 101-198, 301-394, 501-594, 701-798, or 901-975, including the modifications of Table 1A.

65. The gRNA of any one of claims 1-64, comprising a YA modification of one or more guide region YA sites.

66. The gRNA of any one of claims 1-65, comprising a YA modification wherein the modification comprises 2′-fluoro, 2′-H, 2′-OMe, ENA, UNA, inosine, or PS modification.

67. The gRNA of any one of claims 1-66, comprising a YA modification of one or more conserved region YA sites.

68. The gRNA of any one of claims 1-67, wherein at least one modified YA site comprises
(i) a 2′-OMe modification, optionally of the pyrimidine of the YA site;
(ii) a 2′-fluoro modification, optionally of the pyrimidine of the YA site; and/or
(iii) a PS modification, optionally of the pyrimidine of the YA site.

69. An LNP composition comprising a gRNA of any one of claims 1-68.

70. A composition comprising a gRNA of any one of claims 1-68 associated with a lipid nanoparticle (LNP).

71. A composition comprising the gRNA of any one of claims 1-68, or the composition of claim 69 or 70, further comprising a nuclease or an mRNA which encodes the nuclease.

72. The composition of claim 71, wherein the nuclease is a Cas protein.

73. The composition of claim 72, wherein the Cas protein is a Cas9.

74. The composition of claim 73, wherein the Cas9 is an S. pyogenes Cas9 or an S. aureus Cas9.

75. The composition of any one of claims 71-74, wherein the nuclease is a nickase or a dCas.

76. The composition of any one of claims 71-75, wherein the nuclease is modified.

77. The composition of claim 76, wherein the modified nuclease comprises a nuclear localization signal (NLS).

78. The composition of any one of claims 71-77, comprising an mRNA which encodes the nuclease.

79. The composition of claim 78, wherein the mRNA comprises the sequence of any one of SEQ ID NOs: 1099-1127 or 1129-1146.

80. A pharmaceutical formulation comprising the gRNA of any one of claims 1-68 or the composition of any one of claims 69-79 and a pharmaceutically acceptable carrier.

81. A method of modifying a target DNA comprising, delivering a Cas protein or a nucleic acid encoding a Cas protein, and any one or more of the following to a cell:
i. the gRNA of any one of claims 1-68;
ii. the composition of any one of claims 69-79; and
iii. the pharmaceutical formulation of claim 80.

82. The method of claim 81, wherein the method results in an insertion or deletion in a gene.

83. The method of claim 81 or 82, further comprising delivering to the cell a template, wherein at least a part of the template incorporates into a target DNA at or near a double strand break site induced by the Cas protein.

84. The gRNA of any one of claims 1-68, the composition of claims 69-79, or the pharmaceutical formulation of claim 80 for use in preparing a medicament for treating a disease or disorder.

85. Use of the gRNA of any one of claims 1-68, the composition of claims 69-79, or the pharmaceutical formulation of claim 80 in the manufacture of a medicament for treating a disease or disorder.
